(19) United States
(12) Patent Application Publication
(10) Pub. No.: US 2011/0105337 A1
(43) Pub. Date: May 5, 2011

(54) METHOD OF DISCOVERING AND ANALYZING SECRETED BIOMARKERS OF DISEASE FROM SOLID TISSUE

(76) Inventor: David B. Krizman, Gaithersburg, MD (US)

(21) Appl. No.: 12/666,288

(22) PCT Filed: Jun. 23, 2008
(86) PCT No.: PCT/US08/67937

§ 371 Date: Nov. 29, 2010

Related U.S. Application Data
(60) Provisional application No. 60/945,662, filed on Jun. 22, 2007.

(51) Int. Cl. C12Q 1/00; C40B 20/00

(52) U.S. Cl. 506/2; 435/40.52

(57) ABSTRACT

The current invention provides a method for discovering protein biomarkers of disease for use in diagnostic assays of bodily fluids by determining differential expression patterns of proteins secreted or released directly by normal and diseased epithelial cells into glandular lumens. Determining those secreted or released proteins directly from the glandular lumen of diseased and normal solid tissue would lead to a catalogue of proteins that have a high degree of probability to be present in various bodily fluids in persons with specific diseases. This would prove useful as a means to diagnose specific conditions and diseases by simply assaying easily acquired bodily fluids. Past efforts to discover such diagnostic/screening markers in bodily fluids have proven difficult at best due to overriding complexity of the proteins within bodily fluids. This invention is a method of discovering those biomarkers in a more focused and less complex protein subpopulation, namely the secreted or released proteins present in glandular lumens.

### FIELD OF THE INVENTION

[0001] The invention provides compositions and methods for detecting of disease biomarkers in biological samples, including samples prepared from formalin-fixed tissue specimens.

### BACKGROUND OF THE INVENTION

[0002] Trained pathologists and histotechnologists perform molecular analyses on cancer tissue to determine the expression of specific molecular biomarkers. Information derived from such analyses is valuable prognostic tool. For instance, a number of different protein biomarkers are associated with specific stages or grades of cancer and are relied upon to guide therapies. The current method of immunohistochemistry (IHC) is very capable of analyzing biomarkers that are highly predictive of a specific stage or grade of cancers. However, in order to perform such a clinical analysis on a tissue sample, it is necessary to procure tissue from a cancer patient either by invasive surgical or by biopsy procedures. These methods can be disruptive and potentially harmful to the patient. Methods to detect the presence of the same clinically relevant biomarkers in patient samples collected by minimally or non-invasive methods are very advantageous. Such patient samples are readily collected by minimally or non-invasive methods from easily-obtained bodily fluids such as whole blood, plasma, serum, saliva, tears, urine, and sweat. However, very few known biomarkers that are detected in tissue can be detected and assayed in bodily fluids such as serum and urine. This is primarily due to a disconnect between knowledge of clinically useful biomarkers that are detected in tissue and those that are detected in bodily fluids.

### SUMMARY OF THE INVENTION

[0003] In general, the present invention relates to detection of diseases such as cancer by analysis of biomarkers contained in biological samples containing luminal proteins. Specifically, the invention provides new methods to identify and characterize disease biomarkers from glandular luminal tissue. Advantageously, the biological samples are obtained from histologically processed samples, including formalin-fixed tissue, by manipulations including the generation of Liquid Tissue preparations.

[0004] In a first aspect, the invention provides a method of identifying a disease biomarker by providing a biological sample having material obtained from a glandular lumen, which contains a protein present within the glandular lumen, and identifying the protein in the biological sample, thereby identifying the disease biomarker. The material obtained from the glandular lumen is from a tissue section, such as might be obtained by the method of tissue microdissection. In certain embodiments, the biological sample is obtained from a mammalian subject suffering from, or at risk of, developing the disease. In other embodiments, the method provides for the identification of two or more proteins in the biological sample, thereby generating a disease protein profile.

[0005] Optionally, the disease protein profile is compared with a control protein profile containing two or more proteins identified in a control biological sample that includes a protein (e.g., a soluble protein) present within a glandular lumen obtained from a mammalian subject not suffering from or not known to be at risk of developing the disease. In some embodiments, the disease protein profile is obtained from two or more biological samples from two or more glandular lumens, which can be obtained from a single subject or from two or more subjects. The control protein profile can be obtained from two or more biological samples from two or more glandular lumens, which can be obtained from a single subject or two or more subjects. In other embodiments, the disease protein profile contains two or more proteins not measurably detectable in the control protein profile. In some embodiments, the disease protein profile and the control protein profile are obtained from the same tissue or organ type. The biological sample or control biological sample optionally are prepared using Liquid Tissue® reagents and protocols. In some embodiments the biological sample is obtained from an animal model of a human disease. The biological sample and/or the control biological sample may include material obtained from an epithelial layer adjacent to the glandular lumen.

[0006] In a second aspect, the invention provides a method of identifying a disease biomarker by providing a first biological sample containing a protein present within a glandular lumen, where the biological sample contains material obtained from the glandular lumen, and a second biological sample that contains material obtained from an epithelial layer adjacent to the glandular lumen, identifying a biomarker protein present in the first biological sample, and comparing the amount of the biomarker protein present in the first biological sample and in the second biological sample.

[0007] The method provides for identification of the protein by mass spectrometry, e.g., RPLC-MS/MS, LC-ESI-MS, LC-ESI-MS/MS, LC-nanospray-MS, LC-nanospray-MS/MS, MALDI-TOF, MALDI-TOF/TOF, SELDI-TOF, or SELDI-TOF/TOF. Alternatively, the protein is identified using a protein array and an immuno-based assay.

[0008] Preferably, the sample material comprises histopathologically processed tissue, fresh tissue, or frozen tissue. Histopathologically processed tissue can be formalin-fixed tissue or cells, formalin-fixed/paraffin embedded (FFPE) tissue or cells, FFPE tissue blocks and cells from said blocks, FFPE tissue blocks and cells from diseased and normal tissue, or FFPE tissue blocks and cells from biopsies obtained surgically. Frozen tissue is frozen by freezing in air or liquid freezing. The biological sample can include a multi-use biomolecule lysate (e.g., a Liquid Tissue® preparation) prepared by the steps of heating a composition containing the biological sample and a reaction buffer at a temperature and a time sufficient to negatively affect protein cross-linking in the biological sample, and treating the resulting composition with an effective amount of a proteolytic enzyme for a time sufficient to disrupt the tissue and cellular structure of the biological sample.

[0009] Unless otherwise defined, all technical and scientific terms used herein have the same meaning as commonly understood by one of ordinary skill in the art to which this invention belongs. Although methods and materials similar or equivalent to those described herein can be used in the practice or testing of the present invention, suitable methods and materials are described below. All publications, patent applications, patents, and other references mentioned herein are incorporated by reference in their entirety. In the case of conflict, the present specification, including definitions, will control. In addition, the materials, methods, and examples are illustrative only and are not intended to be limiting.

### DESCRIPTION OF THE DRAWINGS AND FIGURES

[0010] The present invention may be further appreciated with reference to the appended drawing sheets wherein:

[0011] FIG. 1 is a schematic illustration demonstrating one embodiment of the invention for analyzing proteins obtained from glandular lumens using mass spectrometry.

[0012] Other objects, features, and advantages of the present invention will become apparent from the following detailed description. It should be understood, however, that the detailed description and the specific examples, while indicating preferred embodiments of the invention, are given by way of illustration only, since various changes and modifications within the spirit and scope of the invention will become apparent to those skilled in the art from this detailed description.

### DETAILED DESCRIPTION OF THE INVENTION

[0013] One of the most important factors to be understood by a clinician in order to provide optimal treatment of a disease is the diagnosis of disease status. For example, is a tumor benign or invasive? This frequently involves determining the expression status of a biomarker of the disease. As used herein, a disease biomarker includes a particular protein or form of a protein preferentially present in, or absent from, diseased cells as compared to normal cells, which indicates the stage/grade or the severity of the disease, and under certain conditions predicts the course of disease. Disease biomarkers also include non-protein organic molecules produced in vivo. Advantageous biomarkers are those proteins that also provide an indication of the choice of therapy. Preferably, such a biomarker is linked to a specific disease or group of diseases. It is desirable to interrogate the biomarker in the most accurate and least invasive setting possible, meaning that analysis of the presence or absence of the biomarker in a given tissue is performed not in the tissue itself, but in biological samples, particularly bodily fluids, which are typically amenable to being sampled. Minimally invasive or non-invasive collection provides fluids, including but not limited to, plasma, serum, whole blood, saliva, spinal fluid, tears, and urine. However, a current limitation to biomarker analysis is the lack of biomarkers that can be assayed in bodily fluids.

[0014] The present invention solves this problem by providing methods for the discovery and analysis of secreted biomarkers, generally peptide fragments of luminal proteins, which are useful in detecting and characterizing or staging solid tissue diseases and disorders. The term “protein” is intended to include peptides and polypeptides that have amino acid sequences which are less than but contained within the sequences of full-length proteins. A peptide can include from two to about fifty amino acids (e.g., 5, 10, 15, 20, 30, 40 or 50 amino acids). The proteins secreted or released by diseased cells into glandular lumens and collecting ducts are directed into bodily fluids such as urine, saliva, and blood. As used herein, a “glandular lumen” includes an inner open space or cavity within a tissue, that is generally surrounded by secretory epithelial cells. A glandular lumen collects secreted or released proteins (or peptide fragments thereof) and moves this protein population, often through a series of lumens, into collecting ducts. The protein complexity of these bodily fluids is high so that discovering and identifying disease biomarkers in these biological samples represents a substantial challenge. In addition, the complexity of cellular proteins often prevents efficient identification of peptide sequences from these cellular proteins that are useful as disease biomarkers.

[0015] Prior to the present invention, the art lacked a method by which proteins (or peptide fragments thereof) secreted or released into glandular lumens and connecting ducts could be isolated and identified. Moreover, prior methods have focused on analysis of whole tissue or regions of tissue without recognizing and studying specific structures, such as glandular lumens and connecting ducts that are present in these large regions of tissue. Also, prior to the present invention, laser-based tissue microdissection generally has been performed on whole cells that make up specific features in the tissue itself. Microdissection has not been utilized to specifically remove and procure proteins residing within glandular lumens that are not present at detectable levels within the whole cells.

[0016] This invention is directed in part to a novel approach to discovering and identifying biomarkers of disease directly from proteins contained within glandular lumens present in standard cut tissue sections. First, a biological sample is obtained that contains a protein present within a glandular lumen. Next, the luminal protein is identified by one or more means; often, the protein is modified, such as by proteolytic cleavage, prior to the identification step, in order to detect peptide fragments instead of the full-length protein itself. Validation of the identified proteins as biomarkers is performed, for example, by comparison with a biological sample obtained from normal (i.e., not diseased) tissue. As now demonstrated herein, biomarkers preferentially found in the glandular lumens and connecting ducts of all types of organs and tissue are identified from both frozen and formalin-fixed tissue samples. These biomarkers are novel polypeptides useful in detecting and staging disease, including cancer.

### Biological Samples

[0017] The invention provides biological samples containing a protein present within a glandular lumen. Proteins found in glandular lumens include extracellular proteins, secreted or released proteins, intracellular proteins, membrane-bound proteins, nuclear proteins, cytoplasmic proteins, and organelle proteins. Specifically advantageous glandular lumen proteins include extracellular proteins and secreted proteins. Obtaining a sample solely from the glandular lumen allows one to create a profile (or “archive”) of the proteins expressed in both the normal lumen and the diseased lumen. Often, the proteinaceous material is “trapped” in the lumen when the tissue sample is fixed, such as by freezing or chemical means. Samples are tissues obtained from, e.g., biopsies, diagnostic surgical pathology or cytology. Any biological sample that has been removed from an organism that has solid organ tissue is a sample according to the present invention. The biological sample is derived from a glandular lumen from a normal or a diseased solid tissue sample, which can include fresh tissue, frozen tissue, fresh frozen tissue, or histopathologically processed tissue.

[0018] Preferably, the tissue sample is histopathologically processed, such as by formalin fixation of tissues or cells, formalin fixation and paraffin embedding of tissues or cells, or formalin fixation and/or paraffin embedding of solid tumor tissue. Histopathological processing typically occurs through the use of a formalin fixative. Formalin is used widely because it is relatively inexpensive, easy to handle, and once the formalin-fixed sample is embedded in paraffin the sample is stored easily. Additionally, formalin is often the fixative of choice because it preserves both tissue structure and cellular morphology. Although the exact mechanism may not be understood fully, without wishing to be bound by theory it is believed that fixation occurs by formalin-induced cross-linking of the proteins within the biological specimen. Due to these protein cross-links, formalin fixation has found wide success in the traditional microscopic analysis of histological sections.

[0019] Recently, a novel set of reagents and methods have been developed that allows one skilled in the art to solubilize protein and peptides directly from formalin fixed solid tissue for analysis by advanced assays. (See, U.S. patent application Ser. No. 10/796,288, filed on Mar. 10, 2004, the contents of which are incorporated herein by reference in their entirety) Prior to this discovery, few experimental techniques were available for analysis of proteins and peptides from histopathologically processed solid tissue samples, including histopathologically processed solid tissue and histopathologically processed biopsies obtained from solid tissue, due to the insolubility of the protein as a result of the formalin fixation, and these prior techniques contained substantial limitations. Previously, formalin fixation rendered formalin-fixed pathologic tissue, including histopathologically processed solid organ tissue and histopathologically processed biopsies obtained from solid organ tissue, of little value for many of the powerful analysis methods that have been developed in recent years such as mass spectrometry and protein arrays.

[0020] Formalin fixation for processing and storage of surgically removed solid tissue and biopsies, including those solid tissues and biopsies derived from tumors, is well known by those skilled in the art. For nearly the last one hundred years, solid body tissue has been routinely fixed in formalin or formalin fixed/paraffin wax-embedded (FFPE) blocks. The overwhelming majority of hospitals and pathology laboratories, in the course of diagnostic surgical and anatomic pathology, process all solid tissue with formalin prior to use for many diagnostic tests.

[0021] In order to utilize histologically processed disease and normal tissue, the invention provides for the creation of a biological sample containing a soluble protein/peptide lysate from glandular lumens within histopathologically processed diseased and normal solid tissue. The biological sample is generated from a glandular lumen within the histopathologically processed solid diseased and/or normal tissue or biopsy from such tissue, e.g., a tissue or cellular sample. The biological sample is amenable to subsequent manipulations, including extractions, isolations, further solubilizations, fractionations, dilutions and storage.

[0022] Preferred methods for obtaining luminal biological samples include tissue microdissection, which specifically remove proteinaceous material contained in the lumen. Examples of other methods of obtaining a biological sample from a tissue include, but are not limited to, using a manual core punch, tissue punch, laser-based tissue microdissection and other techniques that are well known in the arts. The actual size of the obtained biological sample is not important as long as there is a sufficient amount to perform the chosen assay.

### Tissue Microdissection of Biological Samples

[0023] Tissue microdissection includes several different technologies that are designed to procure specific cell populations in a highly enriched form, generally directly from thin tissue sections on glass slides. The different technologies for achieving microdissection can be applied to tissue that has been preserved in a frozen state or to tissue that has been chemically preserved, such as that which is achieved by formalin fixation. One methodology is performed by placing the thin tissue section on a plastic-coated glass slide and then placing that glass slide directly above a laser mounted on a microscope. The area of cells to be separated from the rest of the tissue sample is visualized by the microscope and then completely outlined by either repeated or continuous use of the laser to cut the plastic and the tissue attached to the plastic. The portion of the plastic that encompasses the cells is then moved into a collection container, such as with a single shot of the laser whereby the plastic, along with the attached cells, flies up into the collection tube. Alternatively, if the plastic-coated glass slide contacting the tissue section is turned upside down and placed underneath a laser mounted on a microscope, by virtue of gravity the plastic and the cells attached to the outlined plastic fall into a collection tube following laser treatment of the periphery.

[0024] In another method, a thin tissue section is placed on a standard glass slide and placed underneath a microscope-mounted laser. The cells of interest are then visually identified and a cap with a thin photo-reactive film is placed directly on top of the tissue and the laser is activated. By virtue of the laser hitting the photo-reactive film, the film is activated such that the cells directly underneath attach to the underside of the film. The film is then removed with the cells and other material of interest attached thereto and placed into a collection tube for further processing. In still another iteration of tissue microdissection, a thin tissue section is placed on a glass slide with a thin energy transfer coating. This glass slide is then placed underneath a microscope-mounted laser and the cells of interest are microscopically visualized. The laser is then activated to strike the energy transfer coating, which transforms UV light energy into heat, thus causing the cells and material of interest to travel into a collection tube.

### Analysis of Luminal Biological Samples

[0025] The present invention provides for biochemical analysis of cellular components (including proteins or peptides thereof, lipids, carbohydrates and other materials) referred to herein as “analytes,” within glandular lumens of a solid diseased and/or normal tissue. An analyte includes any protein or peptide derived therefrom, or any other cellular component, that is capable of being detected by a detection means known in the art, such as mass spectrometry, Western blotting, immuno-based assays, or a protein array. Preferably, the analyte also is capable of being quantified such that the levels of the analyte in a diseased tissue can be compared with levels in a corresponding tissue derived from an individual not suffering from the disease. Analytes include individual proteins, groups or families of proteins, or multiple members of groups of proteins. When the biomolecule of interest is a peptide, the peptide is directly derived from a previously intact protein from the extract in a soluble liquid form and the peptide and/or collection of peptides derive from and is representative of the total protein content of the glandular lumen procured from the starting diseased or normal solid tissue sample. As with proteins, any resulting peptide extract from a starting protein extract can be placed in any number of peptide/protein identification, analysis, and expression assays including but not limited to mass spectrometry, Western blots, immuno-based assays, and protein arrays.

[0026] The analysis of the proteins contained within a normal or diseased glandular lumen is encompassed by the term “proteomics”, which most generally refers to the large scale study of proteins. For instance, all proteomic technologies rely on the ability to separate a complex mixture so that individual proteins are more easily processed with other techniques. Proteomics also involves the identification of specific proteins. For instance, identification may involve low-throughput sequencing through Edman degradation. Higher-throughput proteomic techniques are based on mass spectrometry, commonly peptide mass fingerprinting, or de novo repeat detection sequencing on instruments capable of more than one round of mass spectrometry. Antibody-based assays can also be used, but usually are specific to one sequence motif. Other aspects of proteomic studies involve the quantification of protein, the sequence analysis of proteins, the structure of proteins, the interaction of proteins, the modification of proteins and the mapping of the location of proteins in the cell.

[0027] A preferred method of luminal protein analysis is mass spectrometry. Examples of mass spectrometry instrument formats include but are not limited to LC-ESI-MS, LC-ESI-MS/MS, LC-nanospray-MS, LC-nanospray-MS/MS, MALDI-TOF, MALDI-TOF/TOF, SELDI-TOF, and SELDI-TOF/TOF.

[0028] The LC-ESI-MS/MS mass spectrometry method of global proteomic profiling involves preparing a protein sample from cells of interest using one of a variety of protein sample preparation protocols. The protein preparation is then digested into peptides with a common protease, e.g., trypsin, and the resulting digestate is injected into a liquid chromatography column. The separation is based on characteristics such as size and charge of individual peptides. As separate fractions elute from the column they are injected by electron spray ionization into a mass spectrometer for peptide identification. Based on the ion trapping and bombardment physics of a mass spectrometry, the primary amino acid structures of peptides are determined and a list of peptides is generated. The masses of the peptides of the unknown proteins in the sample are compared to the theoretical peptide masses of each protein encoded in the genome to generate a list of protein identifications. In general, profiling by mass spectrometry using LC-ESI-MS/MS provides for up to 3,000 protein identifications in a two hour chromatography separation.

[0029] Another mass spectrometry method is MALDI, where tryptic digests are placed onto a metal plate and allowed to dry together with a chemical matrix. A laser is used to activate the matrix, which has the effect of shooting the matrix containing the peptides directly into a mass spectrometer. The same methodology of peptide bombardment then takes place to provide for amino acid sequencing of peptides and identification of peptides and the proteins from which these peptides are derived. In this way, mass spectrometry analysis provides a detailed identification of proteins present in the starting protein preparation. MALDI mass spectrometry can identify about 200 proteins from a single complex biological sample.

Comparison of Luminal Proteins from Diseased and Normal Tissue

[0030] In the present invention, each biological sample containing soluble proteins and peptides as generated herein directly reflects the status of those proteins in the glandular lumen from the diseased solid tissue sample, or from a corresponding normal tissue sample. Thus, in accordance with the invention, the proteins detected in such glandular lumen comprise a protein profile that is then compared with the proteins discovered within the glandular lumen of a normal solid tissue sample in order to identify differentially expressed proteins that may be protein biomarkers of disease and that can provide for a diagnostic assay of bodily fluid.

[0031] The best method for comparing diseased proteins to normal proteins is to utilize a computer program to compare datasets to each other, and to ascertain the differences and commonalties between these two datasets. This is accomplished, for example, by detecting one or more peptides through tandem mass spectrometry for each of the samples and creating a list or index of peptides contained in each sample. The peptides from each list then are used to identify the proteins from which they are derived. Generally, this identification is carried out using one of many commercially available computer programs known in the art, such as SEQUEST (Eng et al., “An approach to correlate tandem mass spectral data of peptides with amino acid sequences in the protein database,” Journal of American Society of Mass Spectrometry 1994, 5(11):976-989) and MASCOT (Perkins et al., “Probability-based protein identification by searching database using mass spectrometry data, “Electrophoresis 1999, 20(18):3551-3567). The information regarding identified proteins is analyzed using a software program such as Microsoft Access in order to develop protein expression datasets. These protein identifications form the foundation for lists of proteins that are present in diseased glandular lumen and absent in normal glandular lumen or that are present at different levels in the two samples. It is these proteins that are useful as disease biomarkers, and which have a high probability to be present in bodily fluids such as serum. Assaying for these proteins in serum provides a way to diagnose a disease using minimally invasive methods for patient sample collection.

[0032] The present invention is not limited to the particular methodologies, protocols, constructs, formulae and reagents described but further include those known to the skilled artisan. It is also to be understood that the terminology used herein is for the purpose of describing particular embodiments only, and is not intended to limit the scope of the present invention.

### Example 1

[0033] Table 1 is a list of proteins found commonly expressed both in uterine fluid as discovered from a literature survey and in soluble protein lysate from the glandular lumen shown in FIG. 1. Of note is that all of the proteins previously shown to be secreted by endometrial cells through a survey of the published literature between 1986 and 2003 are also identified in the protein profile of the endometrial glandular lumen.

### Example 2

[0034] Table 2 shows results from an analysis that determined what types of proteins are present in the glandular lumen protein profile and compares that to the types of proteins from a protein profile determined by mass spectrometry of protein from epithelial cells. Note that the highest percentage of protein in the glandular lumen sample represents proteins that are extracellular associated and membrane bound, whereas a smaller percentage of the total protein is of intracellular origin. The highest percentage of protein in the epithelial cell sample is of intracellular origin. These results indicate that the lumen does in fact contain predominantly secreted extracellular protein and that this invention is advantageous for specifically identifying secreted protein by analysis of protein present within organ and glandular lumens.

### Example 3

[0035] FIG. 4 shows the complete list of proteins identified by mass spectrometry analysis of a soluble protein lysate derived from the organ/glandular lumen from a single histopathologically processed solid tumor tissue sample of endometrial origin shown in FIG. 1.

TABLE 1
Galectin-3 binding protein precursor (Lectin galactoside-binding soluble 3 binding protein)
Gelsolin precursor (Actin-depolymerizing factor)(ADF)(Brevin)(AGEL)
Glycodelin precursor (GD)(Pregnancy-associated endometrial alpha-2 globulin)
Heat shock cognate 71 kDa protein (Heat shock 70 kDa protein 8)
Heat shock protein HSP 90-beta (HSP 84)(HSP 90)
Heat shock-related 70 kDa protein 2 (Heat shock 70 kDa protein 2)
Insulin-like growth factor binding protein 7 precursor (IGFBP-7)(IBP-7)
Lipocalin-1 precursor (Von Ebner gland protein)(VEG protein) (Tear prealbumin)
Serotransferrin precursor (Transferrin)(Siderophilin)(Beta-1-metal binding globulin)

TABLE 2

| | Cancer Cell | Lumen Protein |
|---|---|---|
| Extracellular Proteins | 9.31% | 37.88% |
| Intracellular Proteins | 67.37% | 15.15% |
| Membrane Proteins | 21.23% | 37.88% |

TABLE 3
14-3-3 protein zeta/delta (Protein kinase C inhibitor protein 1) (KCIP-1)
60S ribosomal protein L13 (Breast basic conserved protein 1)
Actin, aortic smooth muscle (Alpha-actin-2)
Actin, cytoplasmic 1 (Beta-actin)
ALB protein
Alpha-1 catenin (Cadherin-associated protein) (Alpha E-catenin)
Alpha-1-antitrypsin precursor (Alpha-1 protease inhibitor) (Alpha-1-antiproteinase)
Alpha-enolase, lung specific (EC 4.2.1.11) (2-phospho-D-glycerate hydro-lyase) (Non-neural enolase) (NNE)
Alpha-tocopherol transfer protein (Alpha-TTP)
Ankyrin-3 (ANK-3) (Ankyrin G)
Annexin A1 (Annexin I) (Lipocortin I) (Calpactin II) (Chromobindin-9) (p35) (Phospholipase A2 inhibitory
Annexin A2 (Annexin II) (Lipocortin II) (Calpactin I heavy chain) (Chromobindin-8) (p36) (Protein I) (Placental)
Annexin A5 (Annexin V) (Lipocortin V) (Endonexin II) (Calphobindin I) (CBP-I) (Placental anticoagulant protein)
Annexin IV variant (Fragment)
AP-3 complex subunit mu-1 (Adapter-related protein complex 3 mu-1 subunit) (Mu-adaptin 3A) (AP-3 adapter)
Apolipoprotein A-I precursor (Apo-AI) (ApoA-I) [Contains: Apolipoprotein A-I(1-242)]
Apoptotic protease-activating factor 1 (Apaf-1)
ARAR9245
AT rich interactive domain 4B (RBP1-like)
ATP synthase gamma chain, mitochondrial precursor
Beta-globin gene from a thalassemia patient, complete cds
C1orf109 protein
Calmodulin (CaM)
cAMP-specific 3′,5′-cyclic phosphodiesterase 4A (EC 3.1.4.17) (DPDE2) (PDE46)
Carbamoyl-phosphate synthase [ammonia], mitochondrial precursor (EC 6.3.4.16) (Carbamoyl-phosphate)
CDNA FLJ34378 fis, clone FEBRA2018051
CDNA FLJ35778 fis, clone TESTI2005378
Cell division cycle associated 1
Centaurin-delta 3 (Cnt-d3) (Arf-GAP, Rho-GAP, ankyrin repeat and pleckstrin homology domain-containing
Ceruloplasmin precursor (EC 1.16.3.1) (Ferroxidase)
Chloride anion exchanger (DRA protein) (Down-regulated in adenoma) (Solute carrier family 26 member 3)
Chromodomain helicase-DNA-binding protein 5 (EC 3.6.1.-) (ATP-dependent helicase CHD5) (CHD-5)
Clusterin precursor (Complement-associated protein SP-40,40) (Complement cytolysis inhibitor) (CLI)
Coatomer subunit delta (Delta-coat protein) (Delta-COP) (Archain)
Coiled-coil domain-containing protein 13
Collagen alpha-1(I) chain precursor
Collagen alpha-2(I) chain precursor
Complement C3 precursor [Contains: Complement C3 beta chain; Complement C3 alpha chain; C3a
Complement C4-A precursor (Acidic complement C4) [Contains: Complement C4 beta chain; Complement
Cytosolic nonspecific dipeptidase (Glutamate carboxypeptidase-like protein 1) (CNDP dipeptidase 2)
Dehydrogenase E1 and transketolase domain containing protein 1
Deleted in malignant brain tumors 1
Dermcidin precursor (Preproteolysin) [Contains: Survival-promoting peptide; DCD-1]
Desmin
DnaJ protein
Elongation factor 1-alpha 2 (EF-1-alpha-2) (Elongation factor 1 A-2) (eEF1A-2) (Statin S1)
Ezrin (p81) (Cytovillin) (Villin-2)
Ferritin light polypeptide variant
Fibrillin-2 precursor
Fibrinogen alpha chain precursor [Contains: Fibrinopeptide A]
Fibulin-1 precursor
Fructose-bisphosphate aldolase A (EC 4.1.2.13) (Muscle-type aldolase) (Lung cancer antigen NY-LU-1)
Galectin-3 binding protein precursor (Lectin galactoside-binding soluble 3 binding protein) (Mac-2 binding)
Gelsolin precursor (Actin-depolymerizing factor) (ADF) (Brevin) (AGEL)
Glutamate [NMDA] receptor subunit epsilon 4 precursor (N-methyl D-aspartate receptor subtype 2D) (NR2D)
Glyceraldehyde-3-phosphate dehydrogenase (EC 1.2.1.12) (GAPDH)
Glycodelin precursor (GD) (Pregnancy-associated endometrial alpha-2 globulin) (PEG) (PAEG) (Placental)
HBS1-like protein (ERFS)
Heat shock cognate 71 kDa protein (Heat shock 70 kDa protein 8)
Heat shock protein HSP 90-beta (HSP 84) (HSP 90)
Heat shock-related 70 kDa protein 2 (Heat shock 70 kDa protein 2)
Hemoglobin delta subunit (Hemoglobin delta chain) (Delta-globin)
Heterogeneous nuclear ribonucleoproteins A2/B1 (hnRNP A2/hnRNP B1)
Histone H2A type 1 (H2A.2)
Histone H4
Homeobox protein BarH-like 1
Homeobox protein Hox-A5 (Hox-1C)
Hornerin
Hsp89-alpha-delta-N
Hypothetical protein
Hypothetical protein DKFZp686C1522
Hypothetical protein DKFZp686J1372
Hpothetical protein DKFZp762N1910 (Fragment)
Hypothetical protein DKFZp781H1112
Hypothetical protein FLJ22833
Hypothetical protein FLJ35808
Hypothetical protein MGC42367
Hypothetical protein MGC9850 (Polymerase (RNA) I polypeptide C)
Hypothetical protein SH3PX3 (Hypothetical protein DKFZp666B159)
Ig gamma-1 chain C region
Ig kappa chain V-II region Cum
Ig kappa chain V-III region SIE
IgG receptor FcRn large subunit p51 precursor (FcRn) (Neonatal Fc receptor) (IgG Fc fragment receptor
IGHA1 protein
IGHM protein
IGKC protein
IGLC2 protein
Immunoglobulin J chain
Immunoglobulin superfamily member 21 precursor
Insulin receptor substrate 2 insertion mutant (Fragment)
Insulin-like growth factor binding protein 7 precursor (IGFBP-7) (IBP-7) (IGF-binding protein 7) (MAC25)
Interleukin-12 beta chain precursor (IL-12B) (IL-12 p40) (Cytotoxic lymphocyte maturation factor 40 kDa
Isocitrate dehydrogenase [NADP] cytoplasmic (EC 1.1.1.42) (Oxalosuccinate decarboxylase) (IDH)
Keratin, type I cytoskeletal 10 (Cytokeratin-10) (CK-10) (Keratin-10) (K10)
Keratin, type I cytoskeletal 12 (Cytokeratin-12) (CK-12) (Keratin-12) (K12)
Keratin, type I cytoskeletal 14 (Cytokeratin-14) (CK-14) (Keratin-14) (K14)
Keratin, type I cytoskeletal 16 (Cytokeratin-16) (CK-16) (Keratin-16) (K16)
Keratin, type I cytoskeletal 19 (Cytokeratin-19) (CK-19) (Keratin-19) (K19)
Keratin, type I cytoskeletal 9 (Cytokeratin-9) (CK-9) (Keratin-9) (K9)
Keratin, type II cytoskeletal 1 (Cytokeratin-1) (CK-1) (Keratin-1) (K1) (67 kDa cytokeratin) (Hair alpha protein)
Keratin, type II cytoskeletal 2 epidermal (Cytokeratin-2e) (K2e) (CK 2e)
Keratin, type II cytoskeletal 5 (Cytokeratin-5) (CK-5) (Keratin-5) (K5) (58 kDa cytokeratin)
Keratin, type II cytoskeletal 6A (Cytokeratin-6A) (CK 6A) (K6a keratin)
Keratin, type II cytoskeletal 8 (Cytokeratin-8) (CK-8) (Keraton-8) (K8)
Kinesin-like protein KIF14
Leucine-rich repeat kinase 1
Lipocalin-1 precursor (Von Ebner gland protein) (VEG protein) (Tear prealbumin) (TP) (Tear lipocalin) (Tlc)
Lipophilin-B precursor (Secretoglobin family 1D member 2)
L-lactate dehydrogenase A chain (EC 1.1.1.27) (LDH-A) (LDH muscle subunit) (LDH-M)
Maltase-glucoamylase, intestinal [Includes: Maltase (EC 3.2.1.20) (Alpha-glucosidase); Glucoamylase
MELL1 protein
Microtubule-associated protein (Fragment)
Mitogen-activated protein kinase kinase kinase 1 (EC 2.7.1.37) (MAPK/ERK kinase kinase 1) (MEK kinase 1)
Mitogen-activated protein kinase kinase kinase 10 (EC 2.7.1.37) (Mixed lineage kinase 2) (Protein kinase)
Multidrug resistance-associated protein 6 (ATP-binding cassette sub-family C member 6) (Anthracycline)
Myosin-10 (Myosin heavy chain, nonmuscle IIb) (Nonmuscle myosin heavy chain IIb) (NMMHC II-b)
Myosin-9 (Myosin heavy chain, nonmuscle IIa) (Nonmuscle myosin heavy chain IIa) (NMMHC II-a)
Nebulin-related anchoring protein
Neurosecretory protein VGF precursor
Niban-like protein (Meg-3)
Novel protein similar to Ankyrin repeat domain protein 18A (LOC441424) (Fragment)
Nuclear receptor-interacting protein 1 (Nuclear factor RIP140) (Receptor-interacting protein 140)
Orexin receptor type 1 (Ox1r) (Hypocretin receptor type 1)
Osteopontin precursor (Bone sialoprotein-1) (Secreted phosphoprotein 1) (SPP-1) (Urinary stone protein)
Otoancorin precursor
Peroxiredoxin-6 (EC 1.11.1.15) (Antioxidant protein 2) (1-Cys peroxiredoxin) (1-Cys PRX)
PIWIL3 protein
Plasma protease C1 inhibitor precursor (C1 Inh) (C1Inh)
Plasminogen activator inhibitor 1 precursor (PAI-1) (Endothelial plasminogen activator inhibitor) (PAI)
Probable G-protein coupled receptor 97 precursor (G-protein coupled receptor PGR26)
Probable helicase senataxin (EC 3.6.1.-) (SEN1 homolog)
Programmed cell death protein 8, mitochondrial precursor (Apoptosis-inducing factor)
Protection of telomeres 1 (hPot1) (POT1-like telomere end-binding protein)
Protein C20orf121
Protein CXorf38
Protein KIAA0494
Prothymosin alpha [Contains: Thymosin alpha-1]
Receptor for advanced glycosylation end-products deletion exon2-6 variant
Recombining binding protein suppressor of hairless-like protein (Transcription factor RBP-L)
RGD, leucine-rich repeat, tropomodulin and proline-rich containing protein (Fragment)
Rho-associated protein kinase 1 (EC 2.7.1.37) (Rho-associated, coiled-coil containing protein kinase 1)
Serine/threonine-protein kinase PLK4 (EC 2.7.1.37) (Polo-like kinase 4) (PLK-4) (Serine/threonine-protein)
Serotransferrin precursor (Transferrin) (Siderophilin) (Beta-1-metal binding globulin)
Shroom-related protein
Similar to CG3714 gene product
Sodium channel protein type X alpha subunit (Voltage-gated sodium channel alpha subunit Nav1.8)
Sodium/hydrogen exchanger 5 (Na(+)/H(+) exchanger 5) (NHE-5) (Solute carrier family 9 member 5)
Solute carrier family 22 member 11 variant (Fragment)
Spectrin alpha chain, brain (Spectrin, non-erythroid alpha chain) (Alpha-II spectrin) (Fodrin alpha chain)
Spermatid perinuclear RNA-binding protein
Spermatogenesis associated 18 homolog
Tetratricopeptide repeat protein 12 (TPR repeat protein 12)
THAP domain-containing protein 2
Thioredoxin (ATL-derived factor) (ADF) (Surface associated sulphydryl protein) (SASP)
Thioredoxin reductase 2, mitochondrial precursor (EC 1.8.1.9) (TR3) (TR-beta) (Selenoprotein Z) (SelZ)
Transcription elongation factor B polypeptide 1 (RNA polymerase II transcription factor SIII subunit C)
Transforming acidic coiled-coil-containing protein 1 (Taxin 1) (Gastric cancer antigen Ga55)
Transgelin-2 (SM22-alpha homolog)
Transitional endoplasmic reticulum ATPase (TER ATPase) (15S Mg(2+)-ATPase p97 subunit) (Valosin)
Tricarboxylate transport protein, mitochondrial precursor (Citrate transport protein) (CTP) (Tricarboxylate)
Trinucleotide repeat-containing gene 6A protein (CAG repeat protein 26) (Glycin-tryptophan protein)
Triosephosphate isomerase (EC 5.3.1.1) (TIM) (Triose-phosphate isomerase)
Tropomyosin alpha-3 chain (Tropomyosin-3) (Tropomyosin gamma) (hTM5)
Tropomyosin beta chain (Tropomyosin 2) (Beta-tropomyosin)
Tubulin alpha-1 chain (Alpha-tubulin 1) (Testis-specific alpha-tubulin) (Tubulin H2-alpha)
Tubulin alpha-2 chain (Alpha-tubulin 2)
Tubulin beta-2 chain
Tubulin beta-2C chain (Tubulin beta-2 chain)
Ubiquitin
Ubiquitin-activating enzyme E1 (A1S9 protein)
Versican core protein precursor (Large fibroblast proteoglycan) (Chondroitin sulfate proteoglycan core
Vimentin
Vitamin D-binding protein precursor (DBP) (Group-specific component) (Gc-globulin) (VDB)
Vitronectin precursor (Serum spreading factor) (S-protein) (V75) [Contains: Vitronectin V65 subunit)
Whirlin (Autosomal recessive deafness type 31 protein)
Zinc finger protein 679

[0036] Unless defined otherwise, all technical and scientific terms used herein have the same meaning as commonly understood to one of ordinary skill in the art to which this invention belongs. Any methods, devices, and materials similar or equivalent to those described herein can be used in the practice or testing of the invention. All publications and patents mentioned herein are incorporated herein by reference.

The application's sequence listing, which the Patent Office published only in electronic form, follows.

SEQUENCE LISTING (175 sequences)

SEQ ID NO: 1 - protein, 245 aa, Homo sapiens
MDKNELVQKAKLAEQAERYDDMAACMKSVTEQGAELSNEERNLLSVAYKNVVGARRSSWRVVSSIEQKTEGAEKKQQMAREYREKIETELRDICNDVLSLLEKFLIPNASQAESKVFYLKMKGDYYRYLAEVAAGDDKKGIVDQSQQAYQEAFEISKKEMQPTHPIRLGLALNFSVFYYEILNSPEKACSLAKTAFDEAIAELDTLSEESYKDSTLIMQLLRDNLTLWTSDTQGDEAEAGEGGEN

SEQ ID NO: 2 - protein, 211 aa, Homo sapiens [sequence omitted]

SEQ ID NO: 3 - protein, 377 aa, Homo sapiens
MCEEEDSTALVCDNGSGLCKAGFAGDDAPRAVFPSIVGRPRHQGVMVGMGQKDSYVGDEAQSKRGILTLKYPIEHGIITNWDDMEKIWHHSFYNELRVAPEEHPTLLTEAPLNPKANREKMTQIMFETFNVPAMYVAIQAVLSLYASGRTTGIVLDSGDGVTHNVPIYEGYALPHAIMRLDLAGRDLTDYLMKILTERGYSFVTTAEREIVRDIKEKLCYVALDFENEMATAASSSSLEKSYELPDGQVITIGNERFRCPETLFQPSFIGMESAGIHETTYNSIMKCDIDIRKDLYANNVLSGGTTMYPGIADRMQKEITALAPSTMKIKIIAPPERKYSVWIGGSILASLSTFQQMWISKQEYDEAGPSIVHRKCF

SEQ ID NO: 4 - protein, 375 aa, Homo sapiens
MDDDIAALVVDNGSGMCKAGFAGDDAPRAVFPSIVGRPRHQGVMVGMGQKDSYVGDEAQSKRGILTLKYPIEHGIVTNWDDMEKIWHHTFYNELRVAPEEHPVLLTEAPLNPKANREKMTQIMFETFNTPAMYVAIQAVLSLYASGRTTGIVMDSGDGVTHTVPIYEGYALPHAILRLDLAGRDLTDYLMKILTERGYSFTTTAEREIVRDIKEKLCYVALDFEQEMATAASSSSLEKSYELPDGQVITIGNERFRCPEALFQPSFLGMESCGIHETTFNSIMKCDVDIRKDLYANTVLSGGTTMYPGIADRMQKEITALAPSTMKIKIIAPPERKYSVWIGGSILASLSTFQQMWISKQEYDESGPSIVHRKCF

SEQ ID NO: 5 - protein, 609 aa, Homo sapiens [sequence omitted]

SEQ ID NO: 6 - protein, 906 aa, Homo sapiens
MTAVHAGNINFKWDPKSLEIRTLAVERLLEPLVTQVTTLVNTNSKGPSNKKRGRSKKAHVLAASVEQATENFLEKGDKIAKESQFLKEELVAAVEDVRKQGDLMKAAAGEFADDPCSSVKRGNMVRAARALLSAVTRLLILADMADVYKLLVQLKVVEDGILKLRNAGNEQDLGIQYKALKPEVDKLNIMAAKRQQELKDVGHRDQMAAARGILQKNVPILYTASQACLQHPDVAAYKANRDLIYKQLQQAVTGISNAAQATASDDASQHQGGGGGELAYALNNFDKQIIVDPLSFSEERFRPSLEERLESIISGAALMADSSCTRDDRRERIVAECNAVRQALQDLLSEYMGNAGRKERSDALNSAIDKMTKKTRDLRRQLRKAVMDHVSDSFLETNVPLLVLIEAAKNGNEKEVKEYAQVFREHANKLIEVANLACSISNNEEGVKLVRMSASQLEALCPQVINAALALAAKPQSKLAQENMDLFKEQWEKQVRVLTDAVDDITSIDDFLAVSENHILEDVNKCVIALQEKDVDGLDRTAGAIRGRAARVIHVVTSEMDNYEPGVYTEKVLEATKLLSNTVMPRFTEQVEAAVEALSSDPAQPMDENEFIDASRLVYDGIRDIRKAVLMIRTPEELDDSDFETEDFDVRSRTSVQTEDDQLIAGQSARAIMAQLPQEQKAKIAEQVASFQEEKSKLDAEVSKWDDSGNDIIVLAKQMCMIMMEMTDFTRGKGPLKNTSDVISAAKKIAEAGSRMDKLGRTIADHCPDSACKQDLLAYLQRIALYCHQLNICSKVKAEVQNLGGELVVSGVDSAMSLIQAAKNLMNAVVQTVKASYVASTKYQKSQGMASLNLPAVSWKMKAPEKKPLVKREKQDETQTKIKRASQKKHVNPVQALSEFKAMDSI

SEQ ID NO: 7 - protein, 418 aa, Homo sapiens
MPSSVSWGILLLAGLCCLVPVSLAEDPQGDAAQKTDTSHHDQDHPTFNKITPNLAEFAFSLYRQLAHQSNSTNIFFSPVSIATAFAMLSLGTKADTHDEILEGLNFNLTEIPEAQIHEGFQELLRTLNQPDSQLQLTTGNGLFLSEGLKLVDKFLEDVKKLYHSEAFTVNFGDTEEAKKQINDYVEKGTQGKIVDLVKELDRDTVFALVNYIFFKGKWERPFEVKDTEEEDFHVDQVTTVKVPMMKRLGMFNIQHCKKLSSWVLLMKYLGNATAIFFLPDEGKLQHLENELTHDIITKFLENEDRRSASLHLPKLSITGTYDLKSVLGQLGITKVFSNGADLSGVTEEAPLKLSKAVHKAVLTIDEKGTEAAGAMFLEAIPMSIPPEVKFNKPFVFLMIEQNTKSPLFMGKVVNPTQK

SEQ ID NO: 8 - protein, 434 aa, Homo sapiens
MSILKIHAREIFDSRGNPTVEVDLFTSKGLFRAAVPSGASTGIYEALELRDNDKTRYMGKGVSKAVEHINKTIAPALVSKKLNVTEQEKIDKLMIEMDGTENKSKFGANAILGVSLAVCKAGAVEKGVPLYRHIADLAGNSEVILPVPAFNVINGGSHAGNKLAMQEFMILPVGAANFREAMRIGAEVYHNLKNVIKEKYGKDATNVGDEGGFAPNILENKEGLELLKTAIGKAGYTDKVVIGMDVAASEFFRSGKYDLDFKSPDDPSRYISPDQLADLYKSFIKDYPVVSIEDPFDQDDWGAWQKFTASAGIQVVGDDLTVTNPKRIAKAVNEKSCNCLLLKVNQIGSVTESLQACKLAQANGWGVMVSHRSGETEDTFIADLVVGLCTGQIKTGAPCRSERLAKYNQLLRIEEELGSKAKFAGRNFRNPLAK

SEQ ID NO: 9 - protein, 278 aa, Homo sapiens
MAEARSQPSAGPQLNALPDHSPLLQPGLAALRRRAREAGVPLAPLPLTDSFLLRFLRARDFDLDLAWRLLKNYYKWRAECPEISADLHPRSIIGLLKAGYHGVLRSRDPTGSKVLIYRIAHWDPKVFTAYDVFRVSLITSELIVQEVETQRNGIKAIFDLEGWQFSHAFQITPSVAKKIAAVLTDSFPLKVRGIHLINEPVIFHAVFSMIKPFLTEKIKERIHMHGNNYKQSLLQHFPDILPLEYGGEEFSMEDICQEWTNFIMKSEDYLSSISESIQ

SEQ ID NO: 10 - protein, 4377 aa, Homo sapiens
MAHAASQLKKNRDLEINAEEEPEKKRKHRKRSRDRKKKSDANASYLRAARAGHLEKALDYIKNGVDINICNQNGLNALHLASKEGHVEVVSELLQREANVDAATKKGNTALHIASLAGQAEVVKVLVTNGANVNAQSQNGFTPLYMAAQENHLEVVKFLLDNGASQSLATEDGFTPLAVALQQGHDQVVSLLLENDTKGKVRLPALHIAARKDDTKAAALLLQNDNNADVESKSGFTPLHIAAHYGNINVATLLLNRAAAVDFTARNDITPLHVASKRGNANMVKLLLDRGAKIDAKTRDGLTPLHCGARSGHEQVVEMLLDRAAPILSKTKNGLSPLHMATQGDHLNCVQLLLQHNVPVDDVTNDYLTALHVAAHCGHYKVAKVLLDKKANPNAKALNGFTPLHIACKKNRIKVMELLLKHGASIQAVTESGLTPIHVAAFMGHVNIVSQLMHHGASPNTTNVRGETALHMAARSGQAEVVRYLVQDGAQVEAKAKDDQTPLHISARLGKADIVQQLLQQGASPNAATTSGYTPLHLSAREGHEDVAAFLLDHGASLSITTKKGFTPLHVAAKYGKLEVANLLLQKSASPDAAGKSGLTPLHVAAHYDNQKVALLLLDQGASPHAAAKNGYTPLHIAAKKNQMDIATTLLEYGADANAVTRQGIASVHLAAQEGHVDMVSLLLGRNANVNLSNKSGLTPLHLAAQEDRVNVAEVLVNQGAHVDAQTKMGYTPLHVGCHYGNIKIVNFLLQHSAKVNAKTKNGYTPLHQAAQQGHTHIINVLLQNNASPNELTVNGNTALGIARRLGYISVVDTLKIVTEETMTTTTVTEKHKMNVPETMNEVLDMSDDEVRKANAPEMLSDGEYISDVEEGEDAMTGDTDKYLGPQDLKELGDDSLPAEGYMGFSLGARSASLRSFSSDRSYTLNRSSYARDSMMIEELLVPSKEQHLTFTREFDSDSLRHYSWAADTLDNVNLVSSPIHSGFLVSFMVDARGGSMRGSRHHGMRIIIPPRKCTAPTRITCRLVKRHKLANPPPMVEGEGLASRLVEMGPAGAQFLGPVIVEIPHFGSMRGKERELIVLRSENGETWKEHQFDSKNEDLTELLNGMDEELDSPEELGKKRICRIITKDFPQYFAVVSRIKQESNQIGPEGGILSSTTVPLVQASFPEGALTKRIRVGLQAQPVPDEIVKKILGNKATFSPIVTVEPRRRKFHKPITMTIPVPPPSGEGVSNGYKGDTTPNLRLLCSITGGTSPAQWEDITGTTPLTFIKDCVSFTTNVSARFWLADCHQVLETVGLATQLYRELICVPYMAKFVVFAKMNDPVESSLRCFCMTDDKVDKTLEQQENFEEVARSKDIEVLEGKPIYVDCYGNLAPLTKGGQQLVFNFYSFKENRLPFSIKIRDTSQEPCGRLSFLKEPKTTKGLPQTAVCNLNITLPAHKKETESDQDDEIEKTDRRQSFASLALRKRYSYLTEPGMIERSTGATRSLPTTYSYKPFFSTRPYQSWTTAPITVPGPAKSGFTSLSSSSSNTPSASPLKSIWSVSTPSPIKSTLGASTTSSVKSISDVASPIRSFRTMSSPIKTVVSQSPYNIQVSSGTLARAPAVTEATPLKGLASNSTFSSRTSPVTTAGSLLERSSITMTPPASPKSNINMYSSSLPFKSIITSAAPLISSPLKSVVSPVKSAVDVISSAKITMASSLSSPVKQMPGHAEVALVNGSISPLKYPSSSTLINGCKATATLQEKISSATNSVSSVVSAATDTVEKVFSTTTAMPFSPLRSYVSAAPSAFQSLRTPSASALYTSLGSSISATTSSVTSSIITVPVYSVVNVLPEPALKKLPDSNSFTKSAAALLSPIKTLTTETHPQPHFSRTSSPVKSSLFLAPSALKLSTPSSLSSSQEILKDVAEMKEDLMRMTAILQTDVPEEKPFQPELPKEGRIDDEEPFKIVEKVKEDLVKVSEILKKDVCVDNKGSPKSPKSDKGHSPEDDWIEFSSEEIREARQQAAASQSPSLPERVQVKAKAASEKDYNLTKVIDYLTNDIGSSSLTNLKYKFEDAKKDGEERQKRVLKPAIALQEHKLKMPPASMRTSTSEKELCKMADSFFGTDTILESPDDFSQHDQDKSPLSDSGFETRSEKTPSAPQSAESTGPKPLFHEVPIPPVITETRTEVVHVIRSYDPSAGDVPQTQPEEPVSPKPSPTFMELEPKPTTSSIKEKVKAFQMKASSEEDDHNRVLSKGMRVKEETHITTTTRMVYHSPPGGEGASERIEETMSVHDIMKAFQSGRDPSKELAGLFEHKSAVSPDVHKSAAETSAQHAEKDNQMKPKLERIIEVHIEKGNQAEPTEVIIRETKKHPEKEMYVYQKDLSRGDINLKDFLPEKHDAFPCSEEQGQQEEEELTAEESLPSYLESSRVNTPVSQEEDSRPSSAQLISDDSYKTLKLLSQHSIEYHDDELSELRGESYRFAEKMLLSEKLDVSHSDTEESVTDHAGPPSSELQGSDKRSREKIATAPKKEILSKIYKDVSENGVGKVSKDEHFDKVTVLHYSGNVSSPKHAMWMRFTEDRLDRGREKLIYEDRVDRTVKEAEEKLTEVSQFFRDKTEKLNDELQSPEKKARPKNGKEYSSQSPTSSSPEKVLLTELLASNDEWVKARQHGPDGQGFPKAEEKAPSLPSSPEKMVLSQQTEDSKSTVEAKGSISQSKAPDGPQSGFQLKQSKLSSIRLKFEQGTHAKSKDMSQEDRKSDGQSRIPVKKIQESKLPVYQVFAREKQQKAIDLPDESVSVQKDFMVLKTKDEHAQSNEIVVNDSGSDNVKKQRTEMSSKAMPDSFSEQQAKDLACHITSDLATRGPWDKKVFRTWESSGATNNKSQKEKLSHVLVHDVRENHIGHPESKSVDQKNEFMSVTERERKLLTNGSLSEIKEMTVKSPSKKVLYREYVVKEGDHPGGLLDQPSRRSESSAVSHIPVRVADERRMLSSNIPDGFCEQSAFPKHELSQKLSQSSMSKETVETQHFNSIEDEKVTYSEISKVSKHQSYVGLCPPLEETETSPTKSPDSLEFSPGKESPSSDVFDHSPIDGLEKLAPLAQTEGGKEIKTLPVYVSFVQVGKQYEKEIQQGGVKKIISQECKTVQETRGTFYTTRQQKQPPSPQGSPEDDTLEQVSFLDSSGKSPLTPETPSSEEVSYEFTSKTPDSLIAYIPGKPSPIPEVSEESEEEEQAKSTSLKQTTVEETAVEREMPNDVSKDSNQRPKNNRVAYIEFPPPPPLDADQIESDKKHHYLPEKEVDMIEVNLQDEHDKYQLAEPVIRVQPPSPVPPGADVSDSSDDESIYQPVPVKKYTFKLKEVDDEQKEKPKASAEKASNQKELESNGSGKDNEFGLGLDSPQNEIAQNGNNDQSITECSIATTAEFSHDTDATEIDSLDGYDLQDEDDGLTESDSKLPIQAMEIKKDIWNTEGILKPADRSFSQSKLEVIEEEGKVGPDEDKPPSKSSSSEKTPDKTDQKSGAQFFTLEGRHPDRSVFPDTYFSYKVDEEFATPFKTVATKGLDFDPWSNNRGDDEVFDSKSREDETKPFGLAVEDRSPATTPDTTPARTPTDESTPTSEPNPFPFHEGKMFEMTRSGAIDMSKRDFVEERLQFFQIGEHTSEGKSGDQGEGDKSMVTATPQPQSGDTTVETNLERNVETPTVEPNPSIPTSGECQEGTSSSGSLEKSAAATNTSKVDPKLRTPIKMGISASTMTMKKEGPGEITDKIEAVMTSCQGLENETITMISNTANSQMGVRPHEKHDFQKDNFNNNNNLDSSTIQTDNIMSNIVLTEHSAPTCTTEKDNPVKVSSGKKTGVLQGHCVRDKQKVLGEQQKTKELIGIRQKSKLPIKATSPKDTFPPNHMSNTKASKMKQVSQSEKTKALTTSSCVDVKSRIPVKNTHRDNIIAVRKACATQKQGQPEKGKAKQLPSKLPVKVRSTCVTTTTTTATTTTTTTTTTTTSCTVKVRKSQLKEVCKHSIEYFKGISGETLKLVDRLSEEEKKMQSELSDEEESTSRNTSLSETSRGGQPSVTTKSARDKKTEAAPLKSKSEKAGSEKRSSRRTGPQSPCERTDIRMAIVADHLGLSWTELARELNFSVDEINQIRVENPNSLISQSFMLLKKWVTRDGKNATTDALTSVLTKINRIDIVTLLEGPIFDYGNISGTRSFADENNVFHDPVDGWQNETSSGNLESCAQARRVTGGLLDRLDDSPDQCRDSITSYLKGEAGKFEANGSHTEITPEAKTKSYFPESQNDVGKQSTKETLKPKIHGSGHVEEPASPLAAYQKSLEETSKLIIEETKPCVPVSMKKMSRTSPADGKPRLSLHEEEGSSGSEQKQGEGFKVKTKKEIRHVEKKSHS

SEQ ID NO: 11 - protein, 346 aa, Homo sapiens
MAMVSEFLKQAWFIENEEQEYVQTVKSSKGGPGSAVSPYPTFNPSSDVAALHKAIMVKGVDEATIIDILTKRNNAQRQQIKAAYLQETGKPLDETLKKALTGHLEEVVLALLKTPAQFDADELRAAMKGLGTDEDTLIEILASRTNKEIRDINRVYREELKRDLAKDITSDTSGDFRNALLSLAKGDRSEDFGVNEDLADSDARALYEAGERRKGTDVNVFNTILTTRSYPQLRRVFQKYTKYSKHDMNKVLDLELKGDIEKCLTAIVKCATSKPAFFAEKLHQAMKGVGTRHKALIRIMVSRSEIDMNDIKAFYQKMYGISLCQAILDETKGDYEKILVALCGGN

SEQ ID NO: 12 - protein, 339 aa, Homo sapiens
MSTVHEILCKLSLEGDHSTPPSAYGSVKAYTNFDAERDALNIETAIKTKGVDEVTIVNILTNRSNAQRQDIAFAYQRRTKKELASALKSALSGHLETVILGLLKTPAQYDASELKASMKGLGTDEDSLIEIICSRTNQELQEINRVYKEMYKTDLEKDIISDTSGDFRKLMVALAKGRRAEDGSVIDYELIDQDARDLYDAGVKRKGTDVPKWISIMTERSVPHLQKVFDRYKSYSPYDMLESIRKEVKGDLENAFLNLVQCIQNKPLYFADRLYDSMKGKGTRDKVLIRIMVSRSEVDMLKIRSEFKRKYGKSLYYYIQQDTKGDYQKALLYLCGGDD

SEQ ID NO: 13 - protein, 320 aa, Homo sapiens
MAQVLRGTVTDFPGFDERADAETLRKAMKGLGTDEESILTLLTSRSNAQRQEISAAFKTLFGRDLLDDLKSELTGKFEKLIVALMKPSRLYDAYELKHALKGAGTNEKVLTEIIASRTPEELRAIKQVYEEEYGSSLEDDVVGDTSGYYQRMLVVLLQANRDPDAGIDEAQVEQDAQALFQAGELKWGTDEEKFITIFGTRSVSHLRKVFDKYMTISGFQIEETIDRETSGNLEQLLLAVVKSIRSIPAYLAETLYYAMKGAGTDDHTLIRVMVSRSEIDLFNIRKEFRKNFATSLYSMIKGDTSGDYKKALLLLCGEDD

SEQ ID NO: 14 - protein, 225 aa, Homo sapiens
AASISRLVLRGQIALECDRALGKTLNSEVANFTLLLEYGRSLEDDIRSDTSFMFQRVLVSLSAGGRDEGNYLDDALVRQDAQDLYEAGEKKWGTDEVKFLTVLCSRNRNHLLHVFDEYKRISQKDIEQSIKSETSGSFEDALLAIVKCMRNKSAYFAEKLYKSMKGLGTDDNTLIRVMVSRAEIDMLDIRAHFKRLYGKSLYSFIKGDTSGDYRKVLLVLCGGDD

SEQ ID NO: 15 - protein, 418 aa, Homo sapiens
MIHSLFLINCSGDIFLEKHWKSVVSQSVCDYFFEAQEKAADVENVPPVISTPHHYLISIYRDKLFFVSVIQTEVPPLFVIEFLHRVADTFQDYFGECSEAAIKDNVVIVYELLEEMLDNGFPLATESNILKELIKPPTILRSVVNSITGSSNVGDTLPTGQLSNIPWRRAGVKYTNNEAYFDVVEEIDAIIDKSGSTVFAEIQGVIDACIKLSGMPDLSLSFMNPRLLDDVSFHPCIRFKRWESERVLSFIPPDGNFRLISYRVSSQNLVAIPVYVKHSISFKENSSCGRFDITIGPKQNMGKTIEGITVTVHMPKVVLNMNLTPTQGSYTFDPVTKVLTWDVGKITPQKLPSLKGLVNLQSGAPKPEENPSLNIQFKIQQLAISGLKVNRLDMYGEKYKPFKGVKYVTKAGKFQVRT

SEQ ID NO: 16 - protein, 267 aa, Homo sapiens
MKAAVLTLAVLFLTGSQARHFWQQDEPPQSPWDRVKDLATVYVDVLKDSGRDYVSQFEGSALGKQLNLKLLDNWDSVTSTFSKLREQLGPVTQEFWDNLEKETEGLRQEMSKDLEEVKAKVQPYLDDFQKKWQEEMELYRQKVEPLRAELQEGARQKLHELQEKLSPLGEEMRDRARAHVDALRTHLAPYSDELRQRLAARLEALKENGGARLAEYHAKATEHLSTLSEKAKPALEDLRQGLLPVLESFKVSFLSALEEYTKKLNTQ

SEQ ID NO: 17 - protein, 1248 aa, Homo sapiens
MDAKARNCLLQHREALEKDIKTSYIMDHMISDGFLTISEEEKVRNEPTQQQRAAMLIKMILKKDNDSYVSFYNALLHEGYKDLAALLHDGIPVVSSSSGKDSVSGITSYVRTVLCEGGVPQRPVVFVTRKKLVNAIQQKLSKLKGEPGWVTIHGMAGCGKSVLAAEAVRDHSLLEGCFPGGVHWVSVGKQDKSGLLMKLQNLCTRLDQDESFSQRLPLNIEEAKDRLRILMLRKHPRSLLILDDVWDSWVLKAFDSQCQILLTTRDKSVTDSVMGPKYVVPVESSLGKEKGLEILSLFVNMKKADLPEQAHSIIKECKGSPLVVSLIGALLRDFPNRWEYYLKQLQNKQFKRIRKSSSYDYEALDEAMSISVEMLREDIKDYYTDLSILQKDVKVPTKVLCILWDMETEEVEDILQEFVNKSLLFCDRNGKSFRYYLHDLQVDFLTEKNCSQLQDLHKKIITQFQRYHQPHTLSPDQEDCMYWYNFLAYHMASAKMHKELCALMFSLDWIKAKTELVGPAHLIHEFVEYRHILDEKDCAVSENFQEFLSLNGHLLGRQPFPNIVQLGLCEPETSEVYQQAKLQAKQEVDNGMLYLEWINKKNITNLSRLVVRPHTDAVYHACFSEDGQRIASCGADKTLQVFKAETGEKLLEIKAHEDEVLCCAFSTDDRFIATCSVDKKVKIWNSMTGELVHTYDEHSEQVNCCHFTNSSHHLLLATGSSDCFLKLWDLNQKECRNTMFGHTNSVNHCRFSPDDKLLASCSADGTLKLWDATSANERKSINVKQFFLNLEDPQEDMEVIVKCCSWSADGARIMVAAKNKIFLFDIHTSGLLGEIHTGHHSTIQYCDFSPQNHLAVVALSQYCVELWNTDSRSKVADCRGHLSWVHGVMFSPDGSSFLTSSDDQTIRLWETKKVCKNSAVMLKQEVDVVFQENEVMVLAVDHIRRLQLINGRTGQIDYLTEAQVSCCCLSPHLQYIAFGDENGAIEILELVNNRIFQSRFQHKKTVWHIQFTADEKTLISSSDDAEIQVWNWQLDKCIFLRGHQETVKDFRLLKNSRLLSWSFDGTVKVWNIITGNKEKDFVCHQGTVLSCDISHDATKFSSTSADKTAKIWSFDLLLPLHELRGHNGCVRCSAFSVDSTLLATGDDNGEIRIWNVSNGELLHLCAPLSEEGAATHGGWVTDLCFSPDGKMLISAGGYIKWWNVVTGESSQTFYTNGTNLKKIHVSPDFKTYVTVDNLGILYILQTLE

SEQ ID NO: 18 - protein, 782 aa, Homo sapiens
MARARAGALLALWVLGAAAHPQCLDFRPPFRPTQPLRLCAQYSDFGCCDEGRDAELTRRFWALASRVDAAEWAACAGYARDLLCQECSPYAAHLYDAEDPFTPLRTVPGLCQDYCLDMWHKCRGLFRHLSTDQELWALEGNLARFCRYLSLDDTDYCFPYLLVNKNLNSNLGHVVADAKGCLQLCLEEVANGLRNPVAMVHARDGTHRFFVAEQVGLVWAYLPDRSRLGKPFLNISRVVLTSPWEGDERGFLGIAFHPSFQHNRRLYVYYSVGIRSSEWIRISEFRVSEDDENAVDHSSERIILEVKEPASNHNGGQLLFGDDGYLYIFTGDGGMAGDPFGTFGNAQNKSALLGKVLRIDVDRKERGLPYGIPPDNPFVGDPAAQPEVYALGVRNMWRCSFDRGDPSSGTGRGRLFCGDVGQNKFEEVDVVERGGNYGWRAREGFECYDRSLCANTSLNDLLPIFAYPHTVGKSVTGGYVYRGCEYPNLNGLYIFGDFMSGRLMSLQENPGTGQWQYSEICMGHGQTCEFPGLINNYYPYIISFGEDEAGELYFMSTGEPSATAPRGVVYKIIDASRRAPPGKCQIQPAQVKIRSRLIPFVPKEKFIPKTRSTPRPTARAPTRAPRRGRPTAAPPAPTPRPARPTQQPGSRRGGGRRRGRLNSASRAFRDGEVRLVRPAGLSSGSGRVEVFVGGRWGTVCDDSWNISGAAVVCRQLGFAYAVRAVKRAEFGQGGSLPILLDDVRCAGWERNLLECQHNGVGTHNCEHDEDAGVVCSHQNPDL

SEQ ID NO: 19 - protein, 1312 aa, Homo sapiens
MKALDEPPYLTVGTDVSAKYRGAFCEAKIKTAKRLVKVKVTFRHDSSTVEVQDDHIKGPLKVGAIVEVKNLDGAYQEAVINKLTDASWYTVVFDDGDEKTLRRSSLCLKGERHFAESETLDQLPLTNPEHFGTPVIGKKTNRGRRSNHIPEEESSSSSSDEDEDDRKQIDELLGKVVCVDYISLDKKKALWFPALVVCPDCSDEIAVKKDNILVRSFKDGKFTSVPRKDVHEITSDTAPKPDAVLKQAFEQALEFHKSRTIPANWKTELKEDSSSSEAEEEEEEEDDEKEKEDNSSEEEEEIEPFPEERENFLQQLYKFMEDRGTPINKRPVLGYRNLNLFKLFRLVHKLGGFDNIESGAVWKQVYQDLGIPVLNSAAGYNVKCAYKKYLYGFEEYCRSANIEFQMALPEKVVNKQCKECENVKEIKVKEENETEIKEIKMEEERNIIPREEKPIEDEIERKENIKPSLGSKKNLLESIPTHSDQEKEVNIKKPEDNENLDDKDDDTTRVDESLNIKVEAEEEKAKSGDETNKEEDEDDEEAEEEEEEEEEEEDEDDDDNNEEEEFECYPPGMKVQVRYGRGKNQKMYEASIKDSDVEGGEVLYLVHYCGWNVRYDEWIKADKIVRPADKNVPKIKHRKKIKNKLDKEKDKDEKYSPKNCKLRRLSKPPFQTNPSPEMVSKLDLTDAKNSDTAHIKSIEITSILNGLQASESSAEDSEQEDERGAQDMDNNGKEESKIDHLTNNRNDLISKEEQNSSSLLEENKVHADLVISKPVSKSPERLRKDIEVLSEDTDYEEDEVTKKRKDVKKDTTDKSSKPQIKRGKRRYCNTEECLKTGSPGKKEEKAKNKESLCMENSSNSSSDEDEEETKAKMTPTKKYNGLEEKRKSLRTTGFYSGFSEVAEKRIKLLNNSDERLQNSRAKDRKDVWSSIQGQWPKKTLKELFSDSDTEAAASPPHPAPEEGVAEESLQTVAEEESCSPSVELEKPPPVNVDSKPIEEKTVEVNDRKAEFPSSGSNSVLNTPPTTPESPSSVTVTEGSRQQSSVTVSEPLAPNQEEVRSIKSETDSTIEVDSVAGELQDLQSEGNSSPAGFDASVSSSSSNQPEPEHPEKACTGQKRVKDAQGGGSSSKKQKRSHKATVVNNKKKGKGTNSSDSEELSAGESITKSQPVKSVSTGMKSHSTKSPARTQSPGKCGKNGDKDPDLKEPSNRLPKVYKWSFQMSDLENMTSAERITILQEKLQEIRKHYLSLKSEVASIDRRRKRLKKKERESAATSSSSSSPSSSSITAAVMLTLAEPSMSSASQNGMSVECR

SEQ ID NO: 20 - protein, 298 aa, Homo sapiens
MFSRAGVAGLSAWTLQPQWIQVRNMATLKDITRRLKSIKNIQKITKSMKMVAAAKYARAERELKPARIYGLGSLALYEKADIKGPEDKKKHLLIGVSSDRGLCGAIHSSIAKQMKSEVATLTAAGKEVMLVGIGDKIRGILYRTHSDQFLVAFKEVGRKPPTFGDASVIALELLNSGYEFDEGSIIFNKFRSVISYKTEEKPIFSLNTVASADSMSIYDDIDADVLQNYQEYNLANIIYYSLKESTTSEQSARMTAMDNASKNASEMIDKLTLTFNRTRQAVITKELIEIISGAAALD

SEQ ID NO: 21 - protein, 175 aa, Homo sapiens [sequence omitted]

SEQ ID NO: 22 - protein, 203 aa, Homo sapiens
MTQDRPLLAVQEALKKCFPVVEEQQGLWQSALRDCQPLLSSLSNLAEQLQAAQNLRFEDVPALRAFPDLKERLRRKQLVAGDIVLDKLGERLAILLKVRDMVSSHVERVFQIYEQHADTVGIDAVLQPSAVSPSVADMLEWLQDIERHYRKSYLKRKYLLSSIQWGDLANIQALPKAWDRISKDEHQDLVQDILLNVSFFLEE

SEQ ID NO: 23 - protein, 886 aa, Homo sapiens
MEPPTVPSERSLSLSLPGPREGQATLKPPPQHLWRQPRTPIRIQQRGYSDSAERAERERQPHRPIERADAMDTSDRPGLRTTRMSWPSSFHGTGTGSGGAGGGSSRRFEAENGPTPSPGRSPLDSQASPGLVLHAGAATSQRRESFLYRSDSDYDMSPKTMSRNSSVTSEAHAEDLIVTPFAQVLASLRSVRSNFSLLTNVPVPSNKRSPLGGPTPVCKATLSEETCQQLARETLEELDWCLEQLETMQTYRSVSEMASHKFKRMLNRELTHLSEMSRSGNQVSEYISTTFLDKQNEVEIPSPTMKEREKQQAPRPRPSQPPPPPVPHLQPMSQITGLKKLMHSNSLNNSNIPRFGVKTDQEELLAQELENLNKWGLNIFCVSDYAGGRSLTCIMYMIFQERDLLKKFRIPVDTMVTYMLTLEDHYHADVAYHNSLHAADVLQSTHVLLATPALDAVFTDLEILAALFAAAIHDVDHPGVSNQFLINTNSELALMYNDESVLENHHLAVGFKLLQEDNCDIFQNLSKRQRQSLRKMVIDMVLATDMSKHMTLLADLKTMVETKKVTSSGVLLLDNYSDRIQVLRNMVHCADLSNPTKPLELYRQWTDRIMAEFFQQGDRERERGMEISPMCDKHTASVEKSQVGFIDYIVHPLWETWADLVHPDAQEILDTLEDNRDWYYSAIRQSPSPPPEEESRGPGHPPLPDKFQFELTLEEEEEEEISMAQIPCTAQEALTAQGLSGVEEALDATIAWEASPAQESLEVMAQEASLEAELEAVYLTQQAQSTGSAPVAPDEFSSREEFVVAVSHSSPSALALQSPLLPAWRTLSVSEHAPGLPGLPSTAAEVEAQREHQAAKRACSACAGTFGEDTSALPAPGGGGSGGDPT

SEQ ID NO: 24 - protein, 1500 aa, Homo sapiens
MTRILTAFKVVRTLKTGFGFTNVTAHQKWKFSRPGIRLLSVKAQTAHIVLEDGTKMKGYSFGHPSSVAGEVVFNTGLGGYPEAITDPAYKGQILTMANPIIGNGGAPDTTALDELGLSKYLESNGIKVSGLLVLDYSKDYNHWLATKSLGQWLQEEKVPAIYGVDTRMLTKIIRDKGTMLGKIEFEGQPVDFVDPNKQNLIAEVSTKDVKVYGKGNPTKVVAVDCGIKNNVIRLLVKRGAEVHLVPWNHDFTKMEYDGILIAGGPGNPALAEPLIQNVRKILESDRKEPLFGISTGNLITGLAAGAKTYKMSMANRGQNQPVLNITNKQAFITAQNHGYALDNTLPAGWKPLFVNVNDQTNEGIMHESKPFFAVQFHPEVTPGPIDTEYLFDSFFSLIKKGKATTITSVLPKPALVASRVEVSKVLILGSGGLSIGQAGEFDYSGSQAVKAMKEENVKTVLMNPNIASVQTNEVGLKQADTVYFLPITPQFVTEVIKAEQPDGLILGMGGQTALNCGVELFKRGVLKEYGVKVLGTSVESIMATEDRQLFSDKLNEINEKIAPSFAVESIEDALKAADTIGYPVMIRSAYALGGLGSGICPNRETLMDLSTKAFAMTNQILVEKSVTGWKEIEYEVVRDADDNCVTVCNMENVDAMGVHTGDSVVVAPAQTLSNAEFQMLRRTSINVVRHLGIVGECNIQFALHPTSMEYCIIEVNARLSRSSALASKATGYPLAFIAAKIALGIPLPEIKNVVSGKTSACFEPSLDYMVTKIPRWDLDRFHGTSSRIGSSMKSVGEVMAIGRTFEESFQKALRMCHPSIEGFTPRLPMNKEWPSNLDLRKELSEPSSTRIYAIAKAIDDNMSLDEIEKLTYIDKWFLYKMRDILNMEKTLKGLNSESMTEETLKRAKEIGFSDKQISKCLGLTEAQTRELRLKKNIHPWVKQIDTLAAEYPSVTNYLYVTYNGQEHDVNFDDHGMMVLGCGPYHIGSSVEFDWCAVSSIRTLRQLGKKTVVVNCNPETVSTDFDECDKLYFEELSLERILDIYHQEACGGCIISVGGQIPNNLAVPLYKNGVKIMGTSPLQIDRAEDRSIFSAVLDELKVAQAPWKAVNTLNEALEFAKSVDYPCLLRPSYVLSGSAMNVVFSEDEMKKFLEEATRVSQEHPVVLTKFVEGAREVEMDAVGKDGRVISHAISEHVEDAGVHSGDATLMLPTQTISQGAIEKVKDATRKIAKAFAISGPFNVQFLVKGNDVLVIECNLRASRSFPFVSKTLGVDFIDVATKVMIGENVDEKHLPTLDHPIIPADYVAIKAPMFSWPRLRDADPILRCEMASTGEVACFGEGIHTAFLKAMLSTGFKIPQKGILIGIQQSFRPRFLGVAEQLHNEGFKLFATEATSDWLNANNVPATPVAWPSQEGQNPSLSSIRKLIRDGSIDLVINLPNNNTKFVHDNYVIRRTAVDSGIPLLTNFQVTKLFAEAVQKSRKVDSKSLFHYRQYSAGKAA

SEQ ID NO: 25 - protein, 464 aa, Homo sapiens
METLSFPRYNVAEIVIHIRNKILTGADGKNLTKNDLYPNPKPEVLHMIYMRALQIVYGIRLEHFYMMPVNSEVMYPHLMEGFLPFSNLVTHLDSFLPICRVNDFETADILCPKAKRTSRFLSGIINFIHFREACRETYMEFLWQYKSSADKMQQLNAAHQEALMKLERLDSVPVEEQEEFKQLSDGIQELQQSLNQDFHQKTIVLQEGNSQKKSNISEKTKRLNELKLSVVSLKEIQESLKTKIVDSPEKLKNYKEKMKDTVQKLKNARQEVVEKYEIYGDSVDCLPSCQLEVQLYQKKIQDLSDNREKLASILKESLNLEDQIESDESELKKLKTEENSFKRLMIVKKEKLATAQFKINKKHEDVKQYKRTVIEDCNKVQEKRGAVYERVTTINQEIQKIKLGIQQLKDAAEREKLKSQEIFLNLKTALEKYHDGIEKAAEDSYAKIDEKTAELKRKMFKMST

SEQ ID NO: 26 - protein, 1544 aa, Homo sapiens
MAAPQDLDIAVWLATVHLEQYADTFRRHGLATAGAARGLGHEELKQLGISATGHRKRILRLLQTGTEEGSLDPKSDSAMEPSPSPAPQAQPPKPVPKPRTVFGGLSGPATTQRPGLSPALGGPGVSRSPEPSPRPPPLPTSSSEQSSALNTVEMMPNSIYFGLDSRGRAQAAQDKAPDSSQISAPTPALRPTTGTVHIMDPGCLYYGVQPVGTPGAPDRRESRGVCQGRAEHRLSRQDLEAREDAGYASLELPGDSTLLSPTLETEETSDDLISPYASFSFTADRLTPLLSGWLDKLSPQGNYVFQRRFVQFNGRSLMYFGSDKDPFPKGVIPLTAIEMTRSSKDNKFQVITGQRVFVFRTESEAQRDMWCSTLQSCLKEQRLLGHPRPPQPPRPLRTGMLELRGHKAKVFAALSPGELALYKSEQAFSLGIGICFIELQGCSVRETKSRSFDLLTPHRCFSFTAESGGARQSWAAALQEAVTETLSDYEVAEKIWSNRANRQCADCGSSRPDWAAVNLGVVICKQCAGQHRALGSGISKVQSLKLDTSVWSNEIVQLFIVLGNDRANRFWAGTLPPGEGLHPDATPGPRGEFISRKYRLGLFRKPHPQYPDHSQLLQALCAAVARPNLLKNMTQLLCVEAFEGEEPWFPPAPDGSCPGLLPSDPSPGVYNEVVVRATYSGFLYCSPVSNKAGPSPPRRGRDAPPRLWCVLGAALEMFASENSPEPLSLIQPQDIVCLGVSPPPTDPGDRFPFSFELILAGGRIQHFGTDGADSLEAWTSAVGKWFSPLSCHQLLGPGLLRLGRLWLRSPSHTAPAPGLWLSGFGLLRGDHLFLCSAPGPGPPAPEDMVHLRRLQEISVVSAADTPDKKEHLVLVETGRTLYLQGEGRLDFTAWNAAIGGAAGGGGTGLQEQQMSRGDIPIIVDACISFVTQHGLRLEGVYRKGGARARSLRLLAEFRRDARSVKLRPGEHFVEDVTDTLKRFFRELDDPVTSARLLPRWREAAELPQKNQRLEKYKDVIGCLPRVNRRTLATLIGHLYRVQKCAALNQMCTRNLALLFAPSVFQTDGRGEHEVRVLQELIDGYISVFDIDSDQVAQIDLEVSLITTWKDVQLSQAGDLIMEVYIEQQLPDNCVTLKVSPTLTAEELTNQVLEMRGTAAGMDLWVTFEIREHGELERPLHPKEKVLEQALQWCQLPEPCSASLLLKKVPLAQAGCLFTGIRRESPRVGLLRCREEPPRLLGSRFQERFFLLRGRCLLLLKEKKSSKPEREWPLEGAKVYLGIRKKLKPPTPWGFTLILEKMHLYLSCTDEDEMWDWTTSILKAQHDDQQPVVLRRHSSSDLARQKFGTMPLLPIRGDDSGATLLSANQTLRRLHNRRTLSMFFPMKSSQGSVEEQEELEEPVYEEPVYEEVGAFPELIQDTSTSFSTTREWTVKPENPLTSQKSLDQPFLSKSSTLGQEERPPEPPPGPPSKSSPQARGSLEEQLLQELSSLILRKGETTAGLGSPSQPSSPQSPSPTGLPTQTPGFPTQPPCTSSPPSSQPLT

SEQ ID NO: 27 - protein, 1065 aa, Homo sapiens
MKILILGIFLFLCSTPAWAKEKHYYIGIIETTWDYASDHGEKKLISVDTEHSNIYLQNGPDRIGRLYKKALYLQYTDETFRTTIEKPVWLGFLGPIIKAETGDKVYVHLKNLASRPYTFHSHGITYYKEHEGAIYPDNTTDFQRADDKVYPGEQYTYMLLATEEQSPGEGDGNCVTRIYHSHIDAPKDIASGLIGPLIICKKDSLDKEKEKHIDREFVVMFSVVDENFSWYLEDNIKTYCSEPEKVDKDNEDFQESNRMYSVNGYTFGSLPGLSMCAEDRVKWYLFGMGNEVDVHAAFFHGQALTNKNYRIDTINLFPATLFDAYMVAQNPGEWMLSCQNLNHLKAGLQAFFQVQECNKSSSKDNIRGKHVRHYYIAAEEIIWNYAPSGIDIFTKENLTAPGSDSAVFFEQGTTRIGGSYKKLVYREYTDASFTNRKERGPEEEHLGILGPVIWAEVGDTIRVTFHNKGAYPLSIEPIGVRFNKNNEGTYYSPNYNPQSRSVPPSASHVAPTETFTYEWTVPKEVGPTNADPVCLAKMYYSAVDPTKDIFTGLIGPMKICKKGSLHANGRQKDVDKEFYLFPTVFDENESLLLEDNIRMFTTAPDQVDKEDEDFQESNKMHSMNGFMYGNQPGLTMCKGDSVVWYLFSAGNEADVHGIYFSGNTYLWRGERRDTANLFPQTSLTLHMWPDTEGTFNVECLTTDHYTGGMKQKYTVNQCRRQSEDSTFYLGERTYYIAAVEVEWDYSPQREWEKELHHLQEQNVSNAFLDKGEFYIGSKYKKVVYRQYTDSTFRVPVERKAEEEHLGILGPQLHADVGDKVKIIFKNMATRPYSIHAHGVQTESSTVTPTLPGETLTYVWKIPERSGAGTEDSACIPWAYYSTVDQVKDLYSGLIGPLIVCRRPYLKVFNPRRKLEFALLFLVFDENESWYLDDNIKTYSDHPEKVNKDDEEFIESNKMHAINGRMFGNLQGLTMHVGDEVNWYLMGMGNEIDLHTVHFHGHSFQYKHRGVYSSDVFDIFPGTYQTLEMFPRTPGIWLLHCHVTDHIHAGMETTYTVLQNEDTKSG

SEQ ID NO: 28 - protein, 764 aa, Homo sapiens
MIEPFGNQYIVARPVYSTNAFEENHKKTGRHHKTFLDHLKVCCSCSPQKAKRIVLSLFPIASWLPAYRLKEWLLSDIVSGISTGIVAVLQGLAFALLVDIPPVYGLYASFFPAIIYLFFGTSRHISVGPFPILSMMVGLAVSGAVSKAVPDRNATTLGLPNNSNNSSLLDDERVRVAAAASVTVLSGIIQLAFGILRIGFVVIYLSESLISGFTTAAAVHVLVSQLKFIFQLTVPSHTDPVSIFKVLYSVFSQIEKTNIADLVTALIVLLVVSIVKEINQRFKDKLPVPIPIEFIMTVIAAGVSYGCDFKNRFKVAVVGDMNPGFQPPITPDVETFQNTVGDCFGIAMVAFAVAFSVASVYSLKYDYPLDGNQELIALGLGNIVCGVFRGFAGSTALSRSAVQESTGGKTQIAGLIGAIIVLIVVLAIGFLLAPLQKSVLAALALGNLKGMLMQFAEIGRLWRKDKYDCLIWIMTFIFTIVLGLGLGLAASVAFQLLTIVFRTQFPKCSTLANIGRTNIYKNKKDYYDMYEPEGVKIFRCPSPIYFANIGFFRRKLIDAVGFSPLRILRKRNKALRKIRKLQKQGLLQVTPKGFICTVDTIKDSDEELDNNQIEVLDQPINTTDLPFHIDWNDDLPLNIEVPKISLHSLILDFSAVSFLDVSSVRGLKSILQEFIRIKVDVYIVGTDDDFIEKLNRYEFFDGEVKSSIFFLTIHDAVLHILMKKDYSTSKFNPSQEKDGKIDFTINTNGGLRNRVYEVPVETKF

SEQ ID NO: 29 - protein, 1954 aa, Homo sapiens
MRGPVGTEEELPRLFAEEMENEDEMSEEEDGGLEAFDDFFPVEPVSLPKKKKPKKLKENKCKGKRKKKEGSNDELSENEEDLEEKSESEGSDYSPNKKKKKKLKDKKEKKAKRKKKDEDEDDNDDGCLKEPKSSGQLMAEWGLDDVDYLFSEEDYHTLTNYKAFSQFLRPLIAKKNPKIPMSKMMTVLGAKWREFSANNPFKGSSAAAAAAAVAAAVETVTISPPLAVSPPQVPQPVPIRKAKTKEGKGPGVRKKIKGSKDGKKKGKGKKTAGLKFRFGGISNKRKKGSSSEEDEREESDFDSASIHSASVRSECSAALGKKSKRRRKKKRIDDGDGYETDHQDYCEVCQQGGEIILCDTCPRAYHLVCLDPELEKAPEGKWSCPHCEKEGIQWEPKDDDDEEEEGGCEEEEDDHMEFCRVCKDGGELLCCDACPSSYHLHCLNPPLPEIPNGEWLCPRCTCPPLKGKVQRILHWRWTEPPAPFMVGLPGPDVEPSLPPPKPLEGIPEREFFVKWAGLSYWHCSWVKELQLELYHTVMYRNYQRKNDMDEPPPFDYGSGDEDGKSEKRKNKDPLYAKMEERFYRYGIKPEWMMIHRILNHSFDKKGDVHYLIKWKDLPYDQCTWEIDDIDIPYYDNLKQAYWGHRELMLGEDTRLPKRLLKKGKKLRDDKQEKPPDTPIVDPTVKFDKQPWYIDSTGGTLHPYQLEGLNWLRFSWAQGTDTILADEMGLGKTVQTIVFLYSLYKEGHSKGPYLVSAPLSTIINWEREFEMWAPDFYVVTYTGDKESRSVIRENEFSFEDNAIRSGKKVFRMKKEVQIKFHVLLTSYELITIDQAILGSIEWACLVVDEAHRLKNNQSKFFRVLNSYKIDYKLLLTGTPLQNNLEELFHLLNFLTPERFNNLEGFLEEFADISKEDQIKKLHDLLGPHMLRRLKADVFKNMPAKTELIVRVELSQMQKKYYKFILTRNFEALNSKGGGNQVSLLNIMMDLKKCCNHPYLFPVAAVEAPVLPNGSYDGSSLVKSSGKLMLLQKMLKKLRDEGHRVLIFSQMTKMLDLLEDFLEYEGYKYERIDGGITGGLRQEAIDRFNAPGAQQFCFLLSTRAGGLGINLATADTVIIYDSDWNPHNDIQAFSRAHRIGQNKKVMIYRFVTRASVEERITQVAKRKMMLTHLVVRPGLGSKSGSMTKQELDDILKFGTEELFKDDVEGMMSQGQRPVTPIPDVQSSKGGNLAASAKKKHGSTPPGDNKDVEDSSVIHYDDAAISKLLDRNQDATDDTELQNMNEYLSSFKVAQYVVREEDGVEEVEREIIKQEENVDPDYWEKLLRHHYEQQQEDLARNLGKGKRIRKQVNYNDASQEDQEWQDELSDNQSEYSIGSEDEDEDFEERPEGQSGRRQSRRQLKSDRDKPLPPLLARVGGNIEVLGFNARQRKAFLNAIMRWGMPPQDAFNSHWLVRDLRGKSEKEFRAYVSLFMRHLCEPGADGAETFADGVPREGLSRQHVLTRIGVMSLVRKKVQEFEHVNGKYSTPDLIPEGPEGKKSGEVISSDPNTPVPASPAHLLPAPLGLPDKMEAQLGYMDEKDPGAQKPRQPLEVQALPAALDRVESEDKHESPASKERAREERPEETEKAPPSPEQLPREEVLPEKEKILDKLELSLIHSRGDSSELRPDDTKAEEKEPIETQQNGDKEEDDEGKKEDKKGKFKFMFNIADGGFTELHTLWQNEERAAVSSGKIYDIWHRRHDYWLLAGIVTHGYARWQDIQNDPRYMILNEPFKSEVHKGNYLEMKNKFLARRFKLLEQALVIEEQLRRAAYLNMTQDPNHPAMALNARLAEVECLAESHQHLSKESLAGNKPANAVLHKVLNQLEELLSDMKADVTRLPSMLSRIPPVAARLQMSERSILSRLTNRAGDPTIQQGAFGSSQMYSNNFGPNFRGPGPGGIVNYNQMPLGPYVTDI

SEQ ID NO: 30 - protein, 449 aa, Homo sapiens
MMKTLLLFVGLLLTWESGQVLGDQTVSDNELQEMSNQGSKYVNKEIQNAVNGVKQIKTLIEKTNEERKTLLSNLEEAKKKKEDALNETRESETKLKELPGVCNETMMALWEECKPCLKQTCMKFYARVCRSGSGLVGRQLEEFLNQSSPFYFWMNGDRIDSLLENDRQQTHMLDVMQDHFSRASSIIDELFQDRFFTREPQDTYHYLPFSLPHRRPHFFFPKSRIVRSLMPFSPYEPLNFHAMFQPFLEMIHEAQQAMDIHFHSPAFQHPPTEFIREGDDDRTVCREIRHNSTGCLRMKDQCDKCREILSVDCSTNNPSQAKLRRELDESLQVAERLTRKYNELLKSYQWKMLNTSSLLEQLNEQFNWVSRLANLTQGEDQYYLRVTTVASHTSDSDVPSGVTEVVVKLFDSDPITVTVPVEVSRKNPKFMETVAEKALQEYRKKHREE

SEQ ID NO: 31 - protein, 511 aa, Homo sapiens
MVLLAAAVCTKAGKAIVSRQFVEMTRTRIEGLLAAFPKLMNTGKQHTFVETESVRYVYQPMEKLYMVLITTKNSNILEDLETLRLFSRVIPEYCRALEENEISEHCFDLIFAFDEIVALGYRENVNLAQIRTFTEMDSHEEKVFRAVRETQEREAKAEMRRKAKELQQARRDAERQGKKAPGFGGFGSSAVSGGSTAAMITETIIETDKPKVAPAPARPSGPSKALKLGAKGKEVDNFVDKLKSEGETIMSSSMGKRTSEATKMHAPPINMESVHMKIEEKITLTCGRDGGLQNMELHGMIMLRISDDKYGRIRLHVENEDKKGVQLQTHPNVDKKLFTAESLIGLKNPEKSFPVNSDVGVLKWRLQTTEESFIPLTINCWPSESGNGCDVNIEYELQEDNLELNDVVITIPLPSGVGAPVIGEIDGEYRHDSRRNTLEWCLPVIDAKNKSGSLEFSIAGQPNDFFPVQVSFVSKKNYCNIQVTKVTQVDGNSPVRFSTETTFLVDKYEIL

SEQ ID NO: 32 - protein, 715 aa, Homo sapiens
MAADESSQNTLRLQFKAMQEMQHKRLQKQMEKKREKELSLKSRADDQEEPLEVSDGLSLLHAGEPNSKNSFEKRVLEDEIEHLRNELRETVDENGRLYKLLKERDFEIKHLKKKIEEDRFAFTGTAGVAGDVVATKIVELSKKNRLLMAESEGAKTRVKQLTNRIQELERELQTALTRLSAKGATDAGAKPPRAQMGDRALLETPEVKALQDRLVATNLKMSDLRNQIQSVKQELRMAQKVLAREVGEDINVQQLLSSPGTWRGRAQQILVLQSKVQELEKQLGQARSQSAGTASDELSVYPDPRKLSAQEKNLLRIRSLEREKQEGLEKLASERDVLQRELEELKKKFEGMRSRNKLLSSEMKTLKSQMGTLVEKGRHDDELIDALMDQLKQLQEILGSLSLQEEKTRVSQHHLDQQLNSEAQRSNSLVAQLQAMVAEREAKVRQLEMEIGQLNVHYLRNKGVGEGSSGREVSPAYTQFLEDPGLTKSPASAGDHVGRLGSSRSVTSLGHTLVESALTRPSLPSPHRTSPRFSDSPEQKGWQAQVSEIKALWQAAEVERDRLTEFVTVLQKRVEESNSKLLESERKLQEERHRTVVLEQHLEKIRLEPGKASASQRAAPRTKTGLPTSNNRHNPTGSEKKDPSFAQLSDVPVESQMEELTTRLAIQVEENEMLKAALGSALRGKEEDFRMYHEILGQVKSVFLQALRQQKTGKQ

SEQ ID NO: 33 - protein, 1464 aa, Homo sapiens
MFSFVDLRLLLLLAATALLTHGQEEGQVEGQDEDIPPITCVQNGLRYHDRDVWKPEPCRICVCDNGKVLCDDVICDETKNCPGAEVPEGECCPVCPDGSESPTDQETTGVEGPKGDTGPRGPRGPAGPPGRDGIPGQPGLPGPPGPPGPPGPPGLGGNFAPQLSYGYDEKSTGGISVPGPMGPSGPRGLPGPPGAPGPQGFQGPPGEPGEPGASGPMGPRGPPGPPGKNGDDGEAGKPGRPGERGPPGPQGARGLPGTAGLPGMKGHRGFSGLDGAKGDAGPAGPKGEPGSPGENGAPGQMGPRGLPGERGRPGAPGPAGARGNDGATGAAGPPGPTGPAGPPGFPGAVGAKGEAGPQGPRGSEGPQGVRGEPGPPGPAGAAGPAGNPGADGQPGAKGANGAPGIAGAPGFPGARGPSGPQGPGGPPGPKGNSGEPGAPGSKGDTGAKGEPGPVGVQGPPGPAGEEGKRGARGEPGPTGLPGPPGERGGPGSRGFPGADGVAGPKGPAGERGSPGPAGPKGSPGEAGRPGEAGLPGAKGLTGSPGSPGPDGKTGPPGPAGQDGRPGPPGPPGARGQAGVMGFPGPKGAAGEPGKAGERGVPGPPGAVGPAGKDGEAGAQGPPGPAGPAGERGEQGPAGSPGFQGLPGPAGPPGEAGKPGEQGVPGDLGAPGPSGARGERGFPGERGVQGPPGPAGPRGANGAPGNDGAKGDAGAPGAPGSQGAPGLQGMPGERGAAGLPGPKGDRGDAGPKGADGSPGKDGVRGLTGPIGPPGPAGAPGDKGESGPSGPAGPTGARGAPGDRGEPGPPGPAGFAGPPGADGQPGAKGEPGDAGAKGDAGPPGPAGPAGPPGPIGNVGAPGAKGARGSAGPPGATGFPGAAGRVGPPGPSGNAGPPGPPGPAGKEGGKGPRGETGPAGRPGEVGPPGPPGPAGEKGSPGADGPAGAPGTPGPQGIAGQRGVVGLPGQRGERGFPGLPGPSGEPGKQGPSGASGERGPPGPMGPPGLAGPPGESGREGAPGAEGSPGRDGSPGAKGDRGETGPAGPPGAPGAPGAPGPVGPAGKSGDRGETGPAGPTGPVGPVGARGPAGPQGPRGDKGETGEQGDRGIKGHRGFSGLQGPPGPPGSPGEQGPSGASGPAGPRGPPGSAGAPGKDGLNGLPGPIGPPGPRGRTGDAGPVGPPGPPGPPGPPGPPSAGFDFSFLPQPPQEKAHDGGRYYRADDANVVRDRDLEVDTTLKSLSQQIENIRSPEGSRKNPARTCRDLKMCHSDWKSGEYWIDPNQGCNLDAIKVFCNMETGETCVYPTQPSVAQKNWYISKNPKDKRHVWFGESMTDGFQFEYGGQGSDPADVAIQLTFLRLMSTEASQNITYHCKNSVAYMDQQTGNLKKALLLQGSNEIEIRAEGNSRFTYSVTVDGCTSHTGAWGKTVIEYKTTKTSRLPIIDVAPLDVGAPDQEFGFDVGPVCFL

SEQ ID NO: 34 - protein, 1366 aa, Homo sapiens
MLSFVDTRTLLLLAVTLCLATCQSLQEETVRKGPAGDRGPRGERGPPGPPGRDGEDGPTGPPGPPGPPGPPGLGGNFAAQYDGKGVGLGPGPMGLMGPRGPPGAAGAPGPQGFQGPAGEPGEPGQTGPAGARGPAGPPGKAGEDGHPGKPGRPGERGVVGPQGARGFPGTPGLPGFKGIRGHNGLDGLKGQPGAPGVKGEPGAPGENGTPGQTGARGLPGERGRVGAPGPAGARGSDGSVGPVGPAGPIGSAGPPGFPGAPGPKGEIGAVGNAGPAGPAGPRGEVGLPGLSGPVGPPGNPGANGLTGAKGAAGLPGVAGAPGLPGPRGIPGPVGAAGATGARGLVGEPGPAGSKGESGNKGEPGSAGPQGPPGPSGEEGKRGPNGEAGSAGPPGPPGLRGSPGSRGLPGADGRAGVMGPPGSRGASGPAGVRGPNGDAGRPGEPGLMGPRGLPGSPGNIGPAGKEGPVGLPGIDGRPGPIGPAGARGEPGNIGFPGPKGPTGDPGKNGDKGHAGLAGARGAPGPDGNNGAQGPPGPQGVQGGKGEQGPPGPPGFQGLPGPSGPAGEVGKPGERGLHGEFGLPGPAGPRGERGPPGESGAAGPTGPIGSRGPSGPPGPDGNKGEPGVVGAVGTAGPSGPSGLPGERGAAGIPGGKGEKGEPGLRGEIGNPGRDGARGAPGAVGAPGPAGATGDRGEAGAAGPAGPAGPRGSPGERGEVGPAGPNGFAGPAGAAGQPGAKGERGAKGPKGENGVVGPTGPVGAAGPAGPNGPPGPAGSRGDGGPPGMTGFPGAAGRTGPPGPSGISGPPGPPGPAGKEGLRGPRGDQGPVGRTGEVGAVGPPGFAGEKGPSGEAGTAGPPGTPGPQGLLGAPGILGLPGSRGERGLPGVAGAVGEPGPLGIAGPPGARGPPGAVGSPGVNGAPGEAGRDGNPGNDGPPGRDGQPGHKGERGYPGNIGPVGAAGAPGPHGPVGPAGKHGNRGETGPSGPVGPAGAVGPRGPSGPQGIRGDKGEPGEKGPRGLPGLKGHNGLQGLPGIAGHHGDQGAPGSVGPAGPRGPAGPSGPAGKDGRTGHPGTVGPAGIRGPQGHQGPAGPPGPPGPPGPPGVSGGGYDFGYDGDFYRADQPRSAPSLRPKDYEVDATLKSLNNQIETLLTPEGSRKNPARTCRDLRLSHPEWSSGYYWIDPNQGCTMDAIKVYCDFSTGETCIRAQPENIPAKNWYRSSKDKKHVWLGETINAGSQFEYNVEGVTSKEMATQLAFMRLLANYASQNITYHCKNSIAYMDEETGNLKKAVILQGSNDVELVAEGNSRFTYTVLVDGCSKKTNEWGKTIIEYKTNKPSRLPFLDIAPLDIGGADQEFFVDIGPVCFK

SEQ ID NO: 35 - protein, 1663 aa, Homo sapiens
MGPTSGPSLLLLLLTHLPLALGSPMYSIITPNILRLESEETMVLEAHDAQGDVPVTVTVHDFPGKKLVLSSEKTVLTPATNHMGNVTFTIPANREFKSEKGRNKFVTVQATFGTQVVEKVVLVSLQSGYLFIQTDKTIYTPGSTVLYRIFTVNHKLLPVGRTVMVNIENPEGIPVKQDSLSSQNQLGVLPLSWDIPELVNMGQWKIRAYYENSPQQVFSTEFEVKEYVLPSFEVIVEPTEKFYYIYNEKGLEVTITARFLYGKKVEGTAFVIFGIQDGEQRISLPESLKRIPIEDGSGEVVLSRKVLLDGVQNPRAEDLVGKSLYVSATVILHSGSDMVQAERSGIPIVTSPYQIHFTKTPKYFKPGMPFDLMVFVTNPDGSPAYRVPVAVQGEDTVQSLTQGDGVAKLSINTHPSQKPLSITVRTKKQELSEAEQATRTMQALPYSTVGNSNNYLHLSVLRTELRPGETLNVNFLLRMDRAHEAKIRYYTYLIMNKGRLLKAGRQVREPGQDLVVLPLSITTDFIPSFRLVAYYTLIGASGQREVVADSVWVDVKDSCVGSLVVKSGQSEDRQPVPGQQMTLKIEGDHGARVVLVAVDKGVFVLNKKNKLTQSKIWDVVEKADIGCTPGSGKDYAGVFSDAGLTFTSSSGQQTAQRAELQCPQPAARRRRSVQLTEKRMDKVGKYPKELRKCCEDGMRENPMRFSCQRRTRFISLGEACKKVFLDCCNYITELRRQHARASHLGLARSNLDEDIIAEENIVSRSEFPESWLWNVEDLKEPPKNGISTKLMNIFLKDSITTWEILAVSMSDKKGICVADPFEVTVMQDFFIDLRLPYSVVRNEQVEIRAVLYNYRQNQELKVRVELLHNPAFCSLATTKRRHQQTVTIPPKSSLSVPYVIVPLKTGLQEVEVKAAVYHHFISDGVRKSLKVVPEGIRMNKTVAVRTLDPERLGREGVQKEDIPPADLSDQVPDTESETRILLQGTPVAQMTEDAVDAERLKHLIVTPSGCGEQNMIGMTPTVIAVHYLDETEQWEKFGLEKRQGALELIKKGYTQQLAFRQPSSAFAAFVKRAPSTWLTAYVVKVFSLAVNLIAIDSQVLCGAVKWLILEKQKPDGVFQEDAPVIHQEMIGGLRNNNEKDMALTAFVLISLQEAKDICEEQVNSLPGSITKAGDFLEANYMNLQRSYTVAIAGYALAQMGRLKGPLLNKFLTTAKDKNRWEDPGKQLYNVEATSYALLALLQLKDFDFVPPVVRWLNEQRYYGGGYGSTQATFMVFQALAQYQKDAPDHQELNLDVSLQLPSRSSKITHRIHWESASLLRSEETKENEGFTVTAEGKGQGTLSVVTMYHAKAKDQLTCNKFDLKVTIKPAPETEKRPQDAKNTMILEICTRYRGDQDATMSILDISMMTGFAPDTDDLKQLANGVDRYISKYELDKAFSDRNTLIIYLDKVSHSEDDCLAFKVHQYFNVELIQPGAVKVYAYYNLEESCTRFYHPEKEDGKLNKLCRDELCRCAEENCFIQKSDDKVTLEERLDKACEPGVDYVYKTRLVKVQLSNDFDEYIMAIEQTIKSGSDEVQVGQQRTFISPIKCREALKLEEKKHYLMWGLSSDFWGEKPNLSYIIGKDTWVEHWPEEDECQDEENQKQCQDLGAFTESMVVFGCPN

SEQ ID NO: 36 - protein, 1744 aa, Homo sapiens
MRLLWGLIWASSFFTLSLQKPRLLLFSPSVVHLGVPLSVGVQLQDVPRGQVVKGSVFLRNPSRNNVPCSPKVDFTLSSERDFALLSLQVPLKDAKSCGLHQLLRGPEVQLVAHSPWLKDSLSRTTNIQGINLLFSSRRGHLFLQTDQPIYNPGQRVRYRVFALDQKMRPSTDTITVMVENSHGLRVRKKEVYMPSSIFQDDFVIPDISEPGTWKISARFSDGLESNSSTQFEVKKYVLPNFEVKITPGKPYILTVPGHLDEMQLDIQARYIYGKPVQGVAYVRFGLLDEDGKKTFFRGLESQTKLVNGQSHISLSKAEFQDALEKLNMGITDLQGLRLYVAAAIIESPGGEMEEAELTSWYFVSSPFSLDLSKTKRHLVPGAPFLLQALVREMSGSPASGIPVKVSATVSSPGSVPEVQDIQQNTDGSGQVSIPIIIPQTISELQLSVSAGSPHPAIARLTVAAPPSGGPGFLSIERPDSRPPRVGDTLNLNLRAVGSGATFSHYYYMILSRGQIVFMNREPKRTLTSVSVFVDHHLAPSFYFVAFYYHGDHPVANSLRVDVQAGACEGKLELSVDGAKQYRNGESVKLHLETDSLALVALGALDTALYAAGSKSHKPLNMGKVFEAMNSYDLGCGPGGGDSALQVFQAAGLAFSDGDQWTLSRKRLSCPKEKTTRKKRNVNFQKAINEKLGQYASPTAKRCCQDGVTRLPMMRSCEQRAARVQQPDCREPFLSCCQFAESLRKKSRDKGQAGLQRALEILQEEDLIDEDDIPVRSFFPENWLWRVETVDRFQILTLWLPDSLTTWEIHGLSLSKTKGLCVATPVQLRVFREFHLHLRLPMSVRRFEQLELRPVLYNYLDKNLTVSVHVSPVEGLCLAGGGGLAQQVLVPAGSARPVAFSVVPTAAAAVSLKVVARGSFEFPVGDAVSKVLQIEKEGAIHREELVYELNPLDHRGRTLEIPGNSDPNMIPDGDFNSYVRVTASDPLDTLGSEGALSPGGVASLLRLPRGCGEQTMIYLAPTLAASRYLDKTEQWSTLPPETKDHAVDLIQKGYMRIQQFRKADGSYAAWLSRDSSTWLTAFVLKVLSLAQEQVGGSPEKLQETSNWLLSQQQADGSFQDPCPVLDRSMQGGLVGNDETVALTAFVTIALHHGLAVFQDEGAEPLKQRVEASISKANSFLGEKASAGLLGAHAAAITAYALSLTKAPVDLLGVAHNNLMAMAQETGDNLYWGSVTGSQSNAVSPTPAPRNPSDPMPQAPALWIETTAYALLHLLLHEGKAEMADQASAWLTRQGSFQGGFRSTQDTVIALDALSAYWIASHTTEERGLNVTLSSTGRNGFKSHALQLNNRQIRGLEEELQFSLGSKINVKVGGNSKGTLKVLRTYNVLDMKNTTCQDLQIEVTVKGHVEYTMEANEDYEDYEYDELPAKDDPDAPLQPVTPLQLFEGRRNRRRREAPKVVEEQESRVHYTVCIWRNGKVGLSGMAIADVTLLSGFHALRADLEKLTSLSDRYVSHFETEGPHVLLYFDSVPTSRECVGFEAVQEVPVGLVQPASATLYDYYNPERRCSVFYGAPSKSRLLATLCSAEVCQCAEGKCPRQRRALERGLQDEDGYRMKFACYYPRVEYGFQVKVLREDSRAAFRLFETKITQVLHFTKDVKAAANQMRNFLVRASCRLRLEPGKEYLIMGLDGATYDLEGHPQYLLDSNSWIEEMPSERLCRSTRQRAACAQLNDFLQEYGTQGCQV

SEQ ID NO: 37 - protein, 475 aa, Homo sapiens
MAALTTLFKYIDENQDRYIKKLAKWVAIQSVSAWPEKRGEIRRMMEVAAADVKQLGGSVELVDIGKQKLPDGSEIPLPPILLGRLGSDPQKKTVCIYGHLDVQPAALEDGWDSEPFTLVERDGKLYGRGSTDDKGPVAGWINALEAYQKTGQEIPVNVRFCLEGMEESGSEGLDELIFARKDTFFKDVDYVCISDNYWLGKKKPCITYGLRGICYFFIEVECSNKDLHSGVYGGSVHEAMTDLILLMGSLVDKRGNILIPGINEAVAAVTEEEHKLYDDIDFDIEEFAKDVGAQILLHSHKKDILMHRWRYPSLSLHGIEGAFSGSGAKTVIPRKVVGKFSIRLVPNMTPEVVGEQVTSYLTKKFAELRSPNEFKVYMGHGGKPWVSDFSHPHYLAGRRAMKTVFGVEPDLTREGGSIPVTLTFQEATGKNVMLLPVGSADDGAHSQNEKLNRYNYIEGTKMLAAYLYEVSQLKD

SEQ ID NO: 38 - protein, 919 aa, Homo sapiens
MASATAAAARRGLGRALPLFWRGYQTERGVYGYRPRKPESREPQGALERPPVDHGLARLVTVYCEHGHKAAKINPLFTGQALLENVPEIQALVQTLQGPFHTAGLLNMGKEEASLEEVLVYLNQIYCGQISIETSQLQSQDEKDWFAKRFEELQKETFTTEERKHLSKLMLESQEFDHFLATKFSTVKRYGGEGAESMMGFFHELLKMSAYSGITDVIIGMPHRGRLNLLTGLLQFPPELMFRKMRGLSEFPENFSATGDVLSHLTSSVDLYFGAHHPLHVTMLPNPSHLEAVNPVAVGKTRGRQQSRQDGDYSPDNSAQPGDRVICLQVHGDASFCGQGIVPETFTLSNLPHFRIGGSVHLIVNNQLGYTTPAERGRSSLYCSDIGKLVGCAIIHVNGDSPEEVVRATRLAFEYQRQFRKDVIIDLLCYRQWGHNELDEPFYTNPIMYKIIRARKSIPDTYAEHLIAGGLMTQEEVSEIKSSYYAKLNDHLNNMAHYRPPALNLQAHWQGLAQPEAQITTWSTGVPLDLLRFVGMKSVEVPRELQMHSHLLKTHVQSRMEKMMDGIKLDWATAEALALGSLLAQGFNVRLSGQDVGRGTFSQRHAIVVCQETDDTYIPLNHMDPNQKGFLEVSNSPLSEEAVLGFEYGMSIESPKLLPLWEAQFGDFFNGAQIIFDTFISGGEAKWLLQSGIVILLPHGYDGAGPDHSSCRIERFLQMCDSAEEGVDGDTVNMFVVHPTTPAQYFHLLRRQMVRNFRKPLIVASPKMLLRLPAAVSTLQEMAPGTTFNPVIGDSSVDPKKVKTLVFCSGKHFYSLVKQRESLGAKKHDFAIIRVEELCPFPLDSLQQEMSKYKHVKDHIWSQEEPQNMGPWSFVSPRFEKQLACKLRLVGRPPLPVPAVGIGTVHLHQHEDILAKTFA

SEQ ID NO: 39 - protein, 1785 aa, homo sapiens
MGISTVILEMCLLWGQVLSTGGWIPRTTDYASLIPSEVPLDPTVAEGSPFPSESTLESTVAEGSPISLESTLESTVAEGSLIPSESTLESTVAEGSDSGLALRLVNGDGRCQGRVEILYRGSWGTVCDDSWDTNDANVVCRQLGCGWAMSAPGNAWFGQGSGPIALDDVRCSGHESYLWSCPHNGWLSHNCGHGEDAGVICSAAQPQSTLRPESWPVRISPPVPTEGSESSLALRLVNGGDRCRGRVEVLYRGSWGTVCDDYWDTNDANVVCRQLGCGWAMSAPGNAQFGQGSGPIVLDDVRCSGHESYLWSCPHNGWLTHNCGHSEDAGVICSAPQSRPTPSPDTWPTSHASTAGPESSLALRLVNGGDRCQGRVEVLYRGSWGTVCDDSWDTSDANVVCRQLGCGWATSAPGNARFGQGSGPIVLDDVRCSGYESYLWSCPHNGWLSHNCQHSEDAGVICSAAHSWSTPSPDTLPTITLPASTVGSESSLALRLVNGGDRCQGRVEVLYQGSWGTVCDDSWDTNDANVVCRQLGCGWAMSAPGNARFGQGSGPIVLDDVRCSGHESYLWSCPHNGWLSHNCGHSEDAGVICSASQSRPTPSPDTWPTSHASTAGSESSLALRLVNGGDRCQGRVEVLYRGSWGTVCDDYWDTNDANVVCRQLGCGWAMSAPGNARFGQGSGPIVLDDVRCSGHESYLWSCPHNGWLSHNCGHHEDAGVICSASQSQPTPSPDTWPTSHASTAGSESSLALRLVNGGDRCQGRVEVLYRGSWGTVCDDYWDTNDANVVCRQLGCGWATSAPGNARFGQGSGPIVLDDVRCSGHESYLWSCPHNGWLSHNCGHHEDAGVICSASQSQPTPSPDTWPTSRASTAGSESTLALRLVNGGDRCRGRVEVLYQGSWGTVCDDYWDTNDANVVCRQLGCGWAMSAPGNAQFGQGSGPIVLDDVRCSGHESYLWSCPHNGWLSHNCGHHEDAGVICSAAQSQSTPRPDTWLTTNLPALTVGSESSLALRLVNGGDRCRGRVEVLYRGSWGTVCDDSWDTNDANVVCRQLGCGWAMSAPGNARFGQGSGPIVLDDVRCSGNESYLWSCPHKGWLTHNCGHHEDAGVICSATQINSTTTDWWHPTTTTTARPSSNCGGFLFYASGTFSSPSYPAYYPNNAKCVWEIEVNSGYRINLGFSNLKLEAHHNCSFDYVEIFDGSLNSSLLLGKICNDTRQIFTSSYNRMTIHFRSDISFQNTGFLAWYNSFPSDATLRLVNLNSSYGLCAGRVEIYHGGTWGTVCDDSWTIQEAEVVCRQLGCGRAVSALGNAYFGSGSGPITLDDVECSGTESTLWQCRNRGWFSHNCNHREDAGVICSGNHLSTPAPFLNITRPNTDYSCGGFLSQPSGDFSSPFYPGNYPNNAKCVWDIEVQNNYRVTVIFRDVQLEGGCNYDYIEVFDGPYRSSPLIARVCDGARGSFTSSSNFMSIRFISDHSITRRGFRAEYYSSPSNDSTNLLCLPNHMQASVSRSYLQSLGFSASDLVISTWNGYYECRPQITPNLVIFTIPYSGCGTFKQADNDTIDYSNFLTAAVSGGIIKRRTDLRIHVSCRMLQNTWVDTMYIANDTIHVANNTIQVEEVQYGNFDVNISFYTSSSFLYPVTSRPYYVDLNQDLYVQAEILHSDAVLTLFVDTCVASPYSNDFTSLTYDLIRSGCVRDDTYGPYSSPSLRIARFRFRAFHFLNRFPSVYLRCKMVVCRAYDPSSRCYRGCVLRSKRDVGSYQEKVDVVLGPIQLQTPPRREEEPR

SEQ ID NO: 40 - protein, 2413 aa, homo sapiens
MGISTVILEMCLLWGQVLSTGGWIPRTTDYASLIPSEVPLDPTVAEGSPFPSESTLESTVAEGSPISLESTLESTVAEGSLIPSESTLESTVAEGSDSGLALRLVNGDGRCQGRVEILYRGSWGTVCDDSWDTNDANVVCRQLGCGWAMSAPGNAWFGQGSGPIALDDVRCSGHESYLWSCPHNGWLSHNCGHGEDAGVICSAAQPQSTLRPESWPVRISPPVPTEGSESSLALRLVNGGDRCRGRVEVLYRGSWGTVCDDYWDTNDANVVCRQLGCGWAMSAPGNAQFGQGSGPIVLDDVRCSGHESYLWSCPHNGWLTHNCGHSEDAGVICSAPQSRPTPSPDTWPTSHASTAGPESSLALRLVNGGDRCQGRVEVLYRGSWGTVCDDSWDTSDANVVCRQLGCGWATSAPGNARFGQGSGPIVLDDVRCSGYESYLWSCPHNGWLSHNCQHSEDAGVICSAAHSWSTPSPDTLPTITLPASTVGSESSLALRLVNGGDRCQGRVEVLYRGSWGTVCDDSWDTNDANVVCRQLGCGWAMLAPGNARFGQGSGPIVLDDVRCSGNESYLWSCPHNGWLSHNCGHSEDAGVICSGPESSLALRLVNGGDRCQGRVEVLYRGSWGTVCDDSWDTNDANVVCRQLGCGWATSAPGNARFGQGSGPIVLDDVRCSGHESYLWSCPNNGWLSHNCGHHEDAGVICSAAQSRSTPRPDTLSTITLPPSTVGSESSLTLRLVNGSDRCQGRVEVLYRGSWGTVCDDSWDTNDANVVCRQLGCGWATSAPGNARFGQGSGPIVLDDVRCSGHESYLWSCPHNGWLSHNCGHHEDAGVICSVSQSRPTPSPDTWPTSHASTAGPESSLALRLVNGGDRCQGRVEVLYRGSWGTVCDDSWDTSDANVVCRQLGCGWATSAPGNARFGQGSGPIVLDDVRCSGYESYLWSCPHNGWLSHNCQHSEDAGVICSAAHSWSTPSPDTLPTITLPASTVGSESSLALRLVNGGDRCQGRVEVLYQGSWGTVCDDSWDTNDANVVCRQLGCGWAMSAPGNARFGQGSGPIVLDDVRCSGHESYLWSCPHNGWLSHNCGHSEDAGVICSASQSRPTPSPDTWPTSHASTAGSESSLALRLVNGGDRCQGRVEVLYRGSWGTVCDDYWDTNDANVVCRQLGCGWAMSAPGNARFGQGSGPIVLDDVRCSGHESYLWSCPHNGWLSHNCGHHEDAGVICSASQSQPTPSPDTWPTSHASTAGSESSLALRLVNGGDRCQGRVEVLYRGSWGTVCDDYWDTNDANVVCRQLGCGWATSAPGNARFGQGSGPIVLDDVRCSGHESYLWSCPHNGWLSHNCGHHEDAGVICSASQSQPTPSPDTWPTSHASTAGSESSLALRLVNGGDRCQGRVEVLYRGSWGTVCDDYWDTNDANVVCRQLGCGWATSAPGNARFGQGSGPIVLDDVRCSGHESYLWSCPHNGWLSHNCGHHEDAGVICSASQSQPTPSPDTWPTSRASTAGSESTLALRLVNGGDRCRGRVEVLYQGSWGTVCDDYWDTNDANVVCRQLGCGWAMSAPGNAQFGQGSGPIVLDDVRCSGHESYLWSCPHNGWLSHNCGHHEDAGVICSAAQSQSTPRPDTWLTTNLPALTVGSESSLALRLVNGGDRCRGRVEVLYRGSWGTVCDDSWDTNDANVVCRQLGCGWAMSAPGNARFGQGSGPIVLDDVRCSGNESYLWSCPHKGWLTHNCGHHEDAGVICSATQINSTTTDWWHPTTTTTARPSSNCGGFLFYASGTFSSPSYPAYYPNNAKCVWEIEVNSGYRINLGFSNLKLEAHHNCSFDYVEIFDGSLNSSLLLGKICNDTRQIFTSSYNRMTIHFRSDISFQNTGFLAWYNSFPSDATLRLVNLNSSYGLCAGRVEIYHGGTWGTVCDDSWTIQEAEVVCRQLGCGRAVSALGNAYFGSGSGPITLDDVECSGTESTLWQCRNRGWFSHNCNHREDAGVICSGNHLSTPAPFLNITRPNTDYSCGGFLSQPSGDFSSPFYPGNYPNNAKCVWDIEVQNNYRVTVIFRDVQLEGGCNYDYIEVFDGPYRSSPLIARVCDGARGSFTSSSNFMSIRFISDHSITRRGFRAEYYSSPSNDSTNLLCLPNHMQASVSRSYLQSLGFSASDLVISTWNGYYECRPQITPNLVIFTIPYSGCGTFKQADNDTIDYSNFLTAAVSGGIIKRRTDLRIHVSCRMLQNTWVDTMYIANDTIHVANNTIQVEEVQYGNFDVNISFYTSSSFLYPVTSRPYYVDLNQDLYVQAEILHSDAVLTLFVDTCVASPYSNDFTSLTYDLIRSGCVRDDTYGPYSSPSLRIARFRFRAFHFLNRFPSVYLRCKMVVCRAYDPSSRCYRGCVLRSKRDVGSYQEKVDVVLGPIQLQTPPRREEEPR

SEQ ID NO: 41 - protein, 2403 aa, homo sapiens
MGISTVILEMCLLWGQVLSTGGWIPRTTDYASLIPSEVPLDPTVAEGSPFPSESTLESTVAEGSPISLESTLESTVAEGSLIPSESTLESTVAEGSDSGLALRLVNGDGRCQGRVEILYRGSWGTVCDDSWDTNDANVVCRQLGCGWAMSAPGNAWFGQGSGPIALDDVRCSGHESYLWSCPHNGWLSHNCGHGEDAGVICSAAQPQSTLRPESWPVRISPPVPTEGSESSLALRLVNGGDRCRGRVEVLYRGSWGTVCDDYWDTNDANVVCRQLGCGWAMSAPGNAQFGQGSGPIVLDDVRCSGHESYLWSCPHNGWLTHNCGHSEDAGVICSAPQSRPTPSPDTWPTSHASTAGPESSLALRLVNGGDRCQGRVEVLYRGSWGTVCDDSWDTSDANVVCRQLGCGWATSAPGNARFGQGSGPIVLDDVRCSGYESYLWSCPHNGWLSHNCQHSEDAGVICSDTLPTITLPASTVGSESSLALRLVNGGDRCQGRVEVLYRGSWGTVCDDSWDTNDANVVCRQLGCGWAMLAPGNARFGQGSGPIVLDDVRCSGNESYLWSCPHNGWLSHNCGHSEDAGVICSGPESSLALRLVNGGDRCQGRVEVLYRGSWGTVCDDSWDTNDANVVCRQLGCGWATSAPGNARFGQGSGPIVLDDVRCSGHESYLWSCPNNGWLSHNCGHHEDAGVICSAAQSRSTPRPDTLSTITLPPSTVGSESSLTLRLVNGSDRCQGRVEVLYRGSWGTVCDDSWDTNDANVVCRQLGCGWATSAPGNARFGQGSGPIVLDDVRCSGHESYLWSCPHNGWLSHNCGHHEDAGVICSVSQSRPTPSPDTWPTSHASTAGPESSLALRLVNGGDRCQGRVEVLYRGSWGTVCDDSWDTSDANVVCRQLGCGWATSAPGNARFGQGSGPIVLDDVRCSGYESYLWSCPHNGWLSHNCQHSEDAGVICSAAHSWSTPSPDTLPTITLPASTVGSESSLALRLVNGGDRCQGRVEVLYQGSWGTVCDDSWDTNDANVVCRQLGCGWAMSAPGNARFGQGSGPIVLDDVRCSGHESYLWSCPHNGWLSHNCGHSEDAGVICSASQSRPTPSPDTWPTSHASTAGSESSLALRLVNGGDRCQGRVEVLYRGSWGTVCDDYWDTNDANVVCRQLGCGWAMSAPGNARFGQGSGPIVLDDVRCSGHESYLWSCPHNGWLSHNCGHHEDAGVICSASQSQPTPSPDTWPTSHASTAGSESSLALRLVNGGDRCQGRVEVLYRGSWGTVCDDYWDTNDANVVCRQLGCGWATSAPGNARFGQGSGPIVLDDVRCSGHESYLWSCPHNGWLSHNCGHHEDAGVICSASQSQPTPSPDTWPTSHASTAGSESSLALRLVNGGDRCQGRVEVLYRGSWGTVCDDYWDTNDANVVCRQLGCGWATSAPGNARFGQGSGPIVLDDVRCSGHESYLWSCPHNGWLSHNCGHHEDAGVICSASQSQPTPSPDTWPTSRASTAGSESTLALRLVNGGDRCRGRVEVLYQGSWGTVCDDYWDTNDANVVCRQLGCGWAMSAPGNAQFGQGSGPIVLDDVRCSGHESYLWSCPHNGWLSHNCGHHEDAGVICSAAQSQSTPRPDTWLTTNLPALTVGSESSLALRLVNGGDRCRGRVEVLYRGSWGTVCDDSWDTNDANVVCRQLGCGWAMSAPGNARFGQGSGPIVLDDVRCSGNESYLWSCPHKGWLTHNCGHHEDAGVICSATQINSTTTDWWHPTTTTTARPSSNCGGFLFYASGTFSSPSYPAYYPNNAKCVWEIEVNSGYRINLGFSNLKLEAHHNCSFDYVEIFDGSLNSSLLLGKICNDTRQIFTSSYNRMTIHFRSDISFQNTGFLAWYNSFPSDATLRLVNLNSSYGLCAGRVEIYHGGTWGTVCDDSWTIQEAEVVCRQLGCGRAVSALGNAYFGSGSGPITLDDVECSGTESTLWQCRNRGWFSHNCNHREDAGVICSGNHLSTPAPFLNITRPNTDYSCGGFLSQPSGDFSSPFYPGNYPNNAKCVWDIEVQNNYRVTVIFRDVQLEGGCNYDYIEVFDGPYRSSPLIARVCDGARGSFTSSSNFMSIRFISDHSITRRGFRAEYYSSPSNDSTNLLCLPNHMQASVSRSYLQSLGFSASDLVISTWNGYYECRPQITPNLVIFTIPYSGCGTFKQADNDTIDYSNFLTAAVSGGIIKRRTDLRIHVSCRMLQNTWVDTMYIANDTIHVANNTIQVEEVQYGNFDVNISFYTSSSFLYPVTSRPYYVDLNQDLYVQAEILHSDAVLTLFVDTCVASPYSNDFTSLTYDLIRSGCVRDDTYGPYSSPSLRIARFRFRAFHFLNRFPSVYLRCKMVVCRAYDPSSRCYRGCVLRSKRDVGSYQEKVDVVLGPIQLQTPPRREEEPR

SEQ ID NO: 42 - protein, 110 aa, Homo sapiens
MRFMTLLFLTALAGALVCAYDPEAASAPGSGNPCHEASAAQKENAGEDPGLARQAPKPRKQRSSLLEKGLDGAKKAVGGLGKLGKDAVEDLESVGKGAVHDVKDVLDSVL

SEQ ID NO: 43 - protein, 470 aa, Homo sapiens
MSQAYSSSQRVSSYRRTFGGAPGFPLGSPLSSPVFPRAGFGSKGSSSSVTSRVYQVSRTSGGAGGLGSLRASRLGTTRTPSSYGAGELLDFSLADAVNQEFLTTRTNEKVELQELNDRFANYIEKVRFLEQQNAALAAEVNRLKGREPTRVAELYEEELRELRRQVEVLTNQRARVDVERDNLLDDLQRLKAKLQEEIQLKEEAENNLAAFRADVDAATLARIDLERRIESLNEEIAFLKKVHEEEIRELQAQLQEQQVQVEMDMSKPDLTAALRDIRAQYETIAAKNISEAEEWYKSKVSDLTQAANKNNDALRQAKQEMMEYRHQIQSYTCEIDALKGTNDSLMRQMRELEDRFASEASGYQDNIARLEEEIRHLKDEMARHLREYQDLLNVKMALDVEIATYRKLLEGEESRINLPIQTYSALNFRETSPEQRGSEVHTKKTVMIKTIETRDGEVVSEATQQQHEVL

SEQ ID NO: 44 - protein, 702 aa, Homo sapiens
MAQKHPGERGLYGAHHSGGASLRTLGPSVDPEIPSFSGLRDSAGTAPNGTRCLTEHSGPKHTQHPNPAHWLDPSHGPPGGPGPPRDAEDPDQSETSSEEESGVDQELSKENETGNQKDGNSFLSIPSACNCQGTPGIPEGPYSEGGNGSSSNFCHHCTSPALGEDELEEEYDDEESLKFPSDFSRVSSGKKPPSRRQRHRFPTKEDTREGGRRDPRSPGRHRLGRKRSQADKRKGLGLWGAEELCQLGQAGFWWLIELLVLVGEYVETCGHLIYACRQLKSSDLDLFRVWMGVWTGRLGGWAQVMFQFLSQGFYCGVGLFTRFLKLLGALLLLALALFLGFLQLGWRFLVGLGDRLGWRDKATWLFSWLDSPALQRCLTLLRDSRPWQRLVRIVQWGWLELPWVKQNINRQGNAPVASGRYCQPEEEVARLLTMAGVPEDELNPFHVLGVEATASDVELKKAYRQLAVMVHPDKNHHPRAEEAFKVLRAAWDIVSNAEKRKEYEMKRMAENELSRSVNEFLSKLQDDLKEAMNTMMCSRCQGKHRRFEMDREPKSARYCAECNRLHPAEEGDFWAESSMLGLKITYFALMDGKVYDITEWAGCQRVGISPDTHRVPYHISFGSRIPGTRGRQRATPDAPPADLQDFLSRIFQVPPGQMPNGNFFAAPQPAPGAAAASKPNSTVPKGEAKPKRRKKVRRPFQR

SEQ ID NO: 45 - protein, 463 aa, Homo sapiens
MGKEKTHINIVVIGHVDSGKSTTTGHLIYKCGGIDKRTIEKFEKEAAEMGKGSFKYAWVLDKLKAERERGITIDISLWKFETTKYYITIIDAPGHRDFIKNMITGTSQADCAVLIVAAGVGEFEAGISKNGQTREHALLAYTLGVKQLIVGVNKMDSTEPAYSEKRYDEIVKEVSAYIKKIGYNPATVPFVPISGWHGDNMLEPSPNMPWFKGWKVERKEGNASGVSLLEALDTILPPTRPTDKPLRLPLQDVYKIGGIGTVPVGRVETGILRPGMVVTFAPVNITTEVKSVEMHHEALSEALPGDNVGFNVKNVSVKDIRRGNVCGDSKSDPPQEAAQFTSQVIILNHPGQISAGYSPVIDCHTAHIACKFAELKEKIDRRSGKKLEDNPKSLKSGDAAIVEMVPGKPMCVESFSQYPPLGRFAVRDMRQTVAVGVIKNVEKKSGGAGKVTKSAQKAQKAGK

SEQ ID NO: 46 - protein, 586 aa, Homo sapiens
MPKPINVRVTTMDAELEFAIQPNTTGKQLFDQVVKTIGLREVWYFGLHYVDNKGFPTWLKLDKKVSAQEVRKENPLQFKFRAKFYPEDVAEELIQDITQKLFFLQVKEGILSDEIYCPPETAVLLGSYAVQAKFGDYNKEVHKSGYLSSERLIPQRVMDQHKLTRDQWEDRIQVWHAEHRGMLKDNAMLEYLKIAQDLEMYGINYFEIKNKKGTDLWLGVDALGLNIYEKDDKLTPKIGFPWSEIRNISFNDKKFVIKPIDKKAPDFVFYAPRLRINKRILQLCMGNHELYMRRRKPDTIEVQQMKAQAREEKHQKQLERQQLETEKKRRETVEREKEQMMREKEELMLRLQDYEEKTKKAERELSEQIQRALQLEEERKRAQEEAERLEADRMAALRAKEELERQAVDQIKSQEQLAAELAEYTAKIALLEEARRRKEDEVEEWQHRAKEAQDDLVKTKEELHLVMTAPPPPPPPVYEPVSYHVQESLQDEGAEPTGYSAELSSEGIRDDRNEEKRITEAEKNERVQRQLLTLSSELSQARDENKRTHNDIIHNENMRQGRDKYKTLRQIRQGNTKQRIDEFEAL

SEQ ID NO: 47 - protein, 191 aa, Homo sapiens
MSSQIRQNYSTDVEAAVNSLVNLYLQASYTYLSLGFYFDRDDVALEGVSHFFRELAEEKREGYERLLKMQNQRGGRALFQDIKKPAEDEWGKTPDAMKAAMALEKKLNQALLDLHALGSARTDPHLCDFLETHFLDEEVKLIKKMGDHLTNLHRLGGPEAGLGEYLSSKGSLSSTTKSLLSPATSEGPLAK

SEQ ID NO: 48 - protein, 2912 aa, Homo sapiens
MGRRRRLCLQLYFLWLGCVVLWAQGTAGQPQPPPPKPPRPQPPPQQVRSATAGSEGGFLAPEYREEGAAVASRVRRRGQQDVLRGPNVCGSRFHSYCCPGWKTLPGGNQCIVPICRNSCGDGFCSRPNMCTCSSGQISSTCGSKSIQQCSVRCMNGGTCADDHCQCQKGYIGTYCGQPVCENGCQNGGRCIGPNRCACVYGFTGPQCERDYRTGPCFTQVNNQMCQGQLTGIVCTKTLCCATIGRAWGHPCEMCPAQPQPCRRGFIPNIRTGACQDVDECQAIPGICQGGNCINTVGSFECRCPAGHKQSETTQKCEDIDECSIIPGICETGECSNTVGSYFCVCPRGYVTSTDGSRCIDQRTGMCFSGLVNGRCAQELPGRMTKMQCCCEPGRCWGIGTIPEACPVRGSEEYRRLCMDGLPMGGIPGSAGSRPGGTGGNGFAPSGNGNGYGPGGTGFIPIPGGNGFSPGVGGAGVGAGGQGPIITGLTILNQTIDICKHHANLCLNGRCIPTVSSYRCECNMGYKQDANGDCIDVDECTSNPCTNGDCVNTPGSYYCKCHAGFQRTPTKQACIDIDECIQNGVLCKNGRCVNTDGSFQCICNAGFELTTDGKNCVDHDECTTTNMCLNGMCINEDGSFKCICKPGFVLAPNGRYCTDVDECQTPGICMNGHCINSEGSFRCDCPPGLAVGMDGRVCVDTHMRSTCYGGIKKGVCVRPFPGAVTKSECCCANPDYGFGEPCQPCPAKNSAEFHGLCSSGVGITVDGRDINECALDPDICANGICENLRGSYRCNCNSGYEPDASGRNCIDIDECLVNRLLCDNGLCRNTPGSYSCTCPPGYVFRTETETCEDINECESNPCVNGACRNNLGSFNCECSPGSKLSSTGLICIDSLKGTCWLNIQDSRCEVNINGATLKSECCATLGAAWGSPCERCELDTACPRGLARIKGVTCEDVNECEVFPGVCPNGRCVNSKGSFHCECPEGLTLDGTGRVCLDIRMEQCYLKWDEDECIHPVPGKFRMDACCCAVGAAWGTECEECPKPGTKEYETLCPRGAGFANRGDVLTGRPFYKDINECKAFPGMCTYGKCRNTIGSFKCRCNSGFALDMEERNCTDIDECRISPDLCGSGICVNTPGSFECECFEGYESGFMMMKNCMDIDECERNPLLCRGGTCVNTEGSFQCDCPLGHELSPSREDCVDINECSLSDNLCRNGKCVNMIGTYQCSCNPGYQATPDRQGCTDIDECMIMNGGCDTQCTNSEGSYECSCSEGYALMPDGRSCADIDECENNPDICDGGQCTNIPGEYRCLCYDGFMASMDMKTCIDVNECDLNSNICMFGECENTKGSFICHCQLGYSVKKGTTGCTDVDECEIGAHNCDMHASCLNIPGSFKCSCREGWIGNGIKCIDLDECSNGTHQCSINAQCVNTPGSYRCACSEGFTGDGFTCSDVDECAENINLCENGQCLNVPGAYRCECEMGFTPASDSRSCQDIDECSFQNICVFGTCNNLPGMFHCICDDGYELDRTGGNCTDIDECADPINCVNGLCVNTPGRYECNCPPDFQLNPTGVGCVDNRVGNCYLKFGPRGDGSLSCNTEIGVGVSRSSCCCSLGKAWGNPCETCPPVNSTEYYTLCPGGEGFRPNPITIILEDIDECQELPGLCQGGNCINTFGSFQCECPQGYYLSEDTRICEDIDECFAHPGVCGPGTCYNTLGNYTCICPPEYMQVNGGHNCMDMRKSFCYRSYNGTTCENELPFNVTKRMCCCTYNVGKAWNKPCEPCPTPGTADFKTICGNIPGFTFDIHTGKAVDIDECKEIPGICANGVCINQIGSFRCECPTGFSYNDLLLVCEDIDECSNGDNLCQRNADCINSPGSYRCECAAGFKLSPNGACVDRNECLEIPNVCSHGLCVDLQGSYQCICHNGFKASQDQTMCMDVDECERHPCGNGTCKNTVGSYNCLCYPGFELTHNNDCLDIDECSSFFGQVCRNGRCFNEIGSFKCLCNEGYELTPDGKNCIDTNECVALPGSCSPGTCQNLEGSFRCICPPGYEVKSENCIDINECDEDPNICLFGSCTNTPGGFQCLCPPGFVLSDNGRRCFDTRQSFCFTNFENGKCSVPKAFNTTKAKCCCSKMPGEGWGDPCELCPKDDEVAFQDLCPYGHGTVPSLHDTREDVNECLESPGICSNGQCINTDGSFRCECPMGYNLDYTGVRCVDTDECSIGNPCGNGTCTNVIGSFECNCNEGFEPGPMMNCEDINECAQNPLLCAFRCMNTFGSYECTCPIGYALREDQKMCKDLDECAEGLHDCESRGMMCKNLIGTFMCICPPGMARRPDGEGCVDENECRTKPGICENGRCVNIIGSYRCECNEGFQSSSSGTECLDNRQGLCFAEVLQTICQMASSSRNLVTKSECCCDGGRGWGHQCELCPLPGTAQYKKICPHGPGYTTDGRDIDECKVMPNLCTNGQCINTMGSFRCFCKVGYTTDISGTSCIDLDECSQSPKPCNYICKNTEGSYQCSCPRGYVLQEDGKTCKDLDECQTKQHNCQFLCVNTLGGFTCKCPPGFTQHHTACIDNNECGSQPSLCGAKGICQNTPGSFSCECQRGFSLDATGLNCEDVDECDGNHRCQHGCQNILGGYRCGCPQGYIQHYQWNQCVDENECSNPNACGSASCYNTLGSYKCACPSGFSFDQFSSACHDVNECSSSKNPCNYGCSNTEGGYLCGCPPGYYRVGQGHCVSGMGFNKGQYLSLDTEVDEENALSPEACYECKINGYSKKDSRQKRSIHEPDPTAVEQISLESVDMDSPVNMKFNLSHLGSKEHILELRPAIQPLNNHIRYVISQGNDDSVFRIHQRNGLSYLHTAKKKLMPGTYTLEITSIPLYKKKELKKLEESNEDDYLLGELGEALRMRLQIQLY

SEQ ID NO: 49 - protein, 866 aa, Homo sapiens
MFSMRIVCLVLSVVGTAWTADSGEGDFLAEGGGVRGPRVVERHQSACKDSDWPFCSDEDWNYKCPSGCRMKGLIDEVNQDFTNRINKLKNSLFEYQKNNKDSHSLTTNIMEILRGDFSSANNRDNTYNRVSEDLRSRIEVLKRKVIEKVQHIQLLQKNVRAQLVDMKRLEVDIDIKIRSCRGSCSRALAREVDLKDYEDQQKQLEQVIAKDLLPSRDRQHLPLIKMKPVPDLVPGNFKSQLQKVPPEWKALTDMPQMRMELERPGGNEITRGGSTSYGTGSETESPRNPSSAGSWNSGSSGPGSTGNRNPGSSGTGGTATWKPGSSGPGSTGSWNSGSSGTGSTGNQNPGSPRPGSTGTWNPGSSERGSAGHWTSESSVSGSTGQWHSESGSFRPDSPGSGNARPNNPDWGTFEEVSGNVSPGTRREYHTEKLVTSKGDKELRTGKEKVTSGSTTTTRRSCSKTVTKTVIGPDGHKEVTKEVVTSEDGSDCPEAMDLGTLSGIGTLDGFRHRHPDEAAFFDTASTGKTFPGFFSPMLGEFVSETESRGSESGIFTNTKESSSHHPGIAEFPSRGKSSSYSKQFTSSTSYNRGDSTFESKSYKMADEAGSEADHEGTHSTKRGHAKSRPVRDCDDVLQTHPSGTQSGIFNIKLPGSSKIFSVYCDQETSLGGWLLIQQRMDGSLNFNRTWQDYKRGFGSLNDEGEGEFWLGNDYLHLLTQRGSVLRVELEDWAGNEAYAEYHFRVGSEAEGYALQVSSYEGTAGDALIEGSVEEGAEYTSHNNMQFSTFDRDADQWEENCAEVYGGGWWYNNCQAANLNGIYYPGGSYDPRNNSPYEIENGVVWVSFRGADYSLRAVRMKIRPLVTQ

SEQ ID NO: 50 - protein, 703 aa, Homo sapiens
MERAAPSRRVPLPLLLLGGLALLAAGVDADVLLEACCADGHRMATHQKDCSLPYATESKECRMVQEQCCHSQLEELHCATGISLANEQDRCATPHGDNASLEATFVKRCCHCCLLGRAAQAQGQSCEYSLMVGYQCGQVFQACCVKSQETGDLDVGGLQETDKIIEVEEEQEDPYLNDRCRGGGPCKQQCRDTGDEVVCSCFVGYQLLSDGVSCEDVNECITGSHSCRLGESCINTVGSFRCQRDSSCGTGYELTEDNSCKDIDECESGIHNCLPDFICQNTLGSFRCRPKLQCKSGFIQDALGNCIDINECLSISAPCPIGHTCINTEGSYTCQKNVPNCGRGYHLNEEGTRCVDVDECAPPAEPCGKGHRCVNSPGSFRCECKTGYYFDGISRMCVDVNECQRYPGRLCGHKCENTLGSYLCSCSVGFRLSVDGRSCEDINECSSSPCSQECANVYGSYQCYCRRGYQLSDVDGVTCEDIDECALPTGGHICSYRCINIPGSFQCSCPSSGYRLAPNGRNCQDIDECVTGIHNCSINETCFNIQGGFRCLAFECPENYRRSAATLQQEKTDTVRCIKSCRPNDVTCVFDPVHTISHTVISLPTFREFTRPEEIIFLRAITPPHPASQANIIFDITEGNLRDSFDIIKRYMDGMTVGVVRQVRPIVGPFHAVLKLEMNYVVGGVVSHRNVVNVHIFVSEYWF

SEQ ID NO: 51 - protein, 364 aa, Homo sapiens
MPYQYPALTPEQKKELSDIAHRIVAPGKGILAADESTGSIAKRLQSIGTENTEENRRFYRQLLLTADDRVNPCIGGVILFHETLYQKADDGRPFPQVIKSKGGVVGIKVDKGVVPLAGTNGETTTQGLDGLSERCAQYKKDGADFAKWRCVLKIGEHTPSALAIMENANVLARYASICQQNGIVPIVEPEILPDGDHDLKRCQYVTEKVLAAVYKALSDHHIYLEGTLLKPNMVTPGHACTQKFSHEEIAMATVTALRRTVPPAVTGITFLSGGQSEEEASINLNAINKCPLLKPWALTFSYGRALQASALKAWGGKKENLKAAQEEYVKRALANSLACQGKYTPSGQAGAAASESLFVSNHAY

SEQ ID NO: 52 - protein, 585 aa, Homo sapiens
MTPPRLFWVWLLVAGTQGVNDGDMRLADGGATNQGRVEIFYRGQWGTVCDNLWDLTDASVVCRALGFENATQALGRAAFGQGSGPIMLDEVQCTGTEASLADCKSLGWLKSNCRHERDAGVVCTNETRSTHTLDLSRELSEALGQIFDSQRGCDLSISVNVQGEDALGFCGHTVILTANLEAQALWKEPGSNVTMSVDAECVPMVRDLLRYFYSRRIDITLSSVKCFHKLASAYGARQLQGYCASLFAILLPQDPSFQMPLDLYAYAVATGDALLEKLCLQFLAWNFEALTQAEAWPSVPTDLLQLLLPRSDLAVPSELALLKAVDTWSWGERASHEEVEGLVEKIRFPMMLPEELFELQFNLSLYWSHEALFQKKTLQALEFHTVPFQLLARYKGLNLTEDTYKPRIYTSPTWSAFVTDSSWSARKSQLVYQSRRGPLVKYSSDYFQAPSDYRYYPYQSFQTPQHPSFLFQDKRVSWSLVYLPTIQSCWNYGFSCSSDELPVLGLTKSGGSDRTIAYENKALMLCEGLFVADVTDFEGWKAAIPSALDTNSSKSTSSFPCPAGHFNGFRTVIRPFYLTNSSGVD

SEQ ID NO: 53 - protein, 782 aa, Homo sapiens
MAPHRPAPALLCALSLALCALSLPVRAATASRGASQAGAPQGRVPEARPNSMVVEHPEFLKAGKEPGLQIWRVEKFDLVPVPTNLYGDFFTGDAYVILKTVQLRNGNLQYDLHYWLGNECSQDESGAAAIFTVQLDDYLNGRAVQHREVQGFESATFLGYFKSGLKYKKGGVASGFKHVVPNEVVVQRLFQVKGRRVVRATEVPVSWESFNNGDCFILDLGNNIHQWCGSNSNRYERLKATQVSKGIRDNERSGRARVHVSEEGTEPEAMLQVLGPKPALPAGTEDTAKEDAANRKLAKLYKVSNGAGTMSVSLVADENPFAQGALKSEDCFILDHGKDGKIFVWKGKQANTEERKAALKTASDFITKMDYPKQTQVSVLPEGGETPLFKQFFKNWRDPDQTDGLGLSYLSSHIANVERVPFDAATLHTSTAMAAQHGMDDDGTGQKQIWRIEGSNKVPVDPATYGQFYGGDSYIILYNYRHGGRQGQIIYNWQGAQSTQDEVAASAILTAQLDEELGGTPVQSRVVQGKEPAHLMSLFGGKPMIIYKGGTSREGGQTAPASTRLFQVRANSAGATRAVEVLPKAGALNSNDAFVLKTPSAAYLWVGTGASEAEKTGAQELLRVLRAQPVQVAEGSEPDGFWEALGGKAAYRTSPRLKDKKMDAHPPRLFACSNKIGRFVIEEVPGELMQEDLATDDVMLLDTWDQVFVWVGKDSQEEEKTEALTSAKRYIETDPANRDRRTPITVVKQGFEPPSFVGWFLGWDDDYWSVDPLDRAMAELAA

SEQ ID NO: 54 - protein, 1336 aa, Homo sapiens
MRGAGGPRGPRGPAKMLLLLALACASPFPEEAPGPGGAGGPGGGLGGARPLNVALVFSGPAYAAEAARLGPAVAAAVRSPGLDVRPVALVLNGSDPRSLVLQLCDLLSGLRVHGVVFEDDSRAPAVAPILDFLSAQTSLPIVAVHGGAALVLTPKEKGSTFLQLGSSTEQQLQVIFEVLEEYDWTSFVAVTTRAPGHRAFLSYIEVLTDGSLVGWEHRGALTLDPGAGEAVLSAQLRSVSAQIRLLFCAREEAEPVFRAAEEAGLTGSGYVWFMVGPQLAGGGGSGAPGEPPLLPGGAPLPAGLFAVRSAGWRDDLARRVAAGVAVVARGAQALLRDYGFLPELGHDCRAQNRTHRGESLHRYFMNITWDNRDYSFNEDGFLVNPSLVVISLTRDRTWEVVGSWEQQTLRLKYPLWSRYGRFLQPVDDTQHLTVATLEERPFVIVEPADPISGTCIRDSVPCRSQLNRTHSPPPDAPRPEKRCCKGFCIDILKRLAHTIGFSYDLYLVTNGKHGKKIDGVWNGMIGEVFYQRADMAIGSLTINEERSEIVDFSVPFVETGISVMVARSNGTVSPSAFLEPYSPAVWVMMFVMCLTVVAVTVFIFEYLSPVGYNRSLATGKRPGGSTFTIGKSIWLLWALVFNNSVPVENPRGTTSKIMVLVWAFFAVIFLASYTANLAAFMIQEEYVDTVSGLSDRKFQRPQEQYPPLKFGTVPNGSTEKNIRSNYPDMHSYMVRYNQPRVEEALTQLKAGKLDAFIYDAAVLNYMARKDEGCKLVTIGSGKVFATTGYGIALHKGSRWKRPIDLALLQFLGDDEIEMLERLWLSGICHNDKIEVMSSKLDIDNMAGVFYMLLVAMGLSLLVFAWEHLVYWRLRHCLGPTHRMDFLLAFSRGMYSCCSAEAAPPPAKPPPPPQPLPSPAYPAPRPAPGPAPFVPRERASVDRWRRTKGAGPPGGAGLADGFHRYYGPIEPQGLGLGLGEARAAPRGAAGRPLSPPAAQPPQKPPPSYFAIVRDKEPAEPPAGAFPGFPSPPAPPAAAATAVGPPLCRLAFEDESPPAPARWPRSDPESQPLLGPGAGGAGGTGGAGGGAPAAPPPCRAAPPPCPYLDLEPSPSDSEDSESLGGASLGGLEPWWFADFPYPYAERLGPPPGRYWSVDKLGGWRAGSWDYLPPRSGPAAWHCRHCASLELLPPPRHLSCSHDGLDGGWWAPPPPPWAAGPLPRRRARCGCPRSHPHRPRASHRTPAAAAPHHHRHRRAAGGWDLPPPAPTSRSLEDLSSCPRAAPARRLTGPSRHARRCPHAAHWGPPLPTASHRRHRGGDLGTRRGSAHFSSLESEV

SEQ ID NO: 55 - protein, 335 aa, Homo sapiens
MGKVKVGVNGFGRIGRLVTRAAFNSGKVDIVAINDPFIDLNYMVYMFQYDSTHGKFHGTVKAENGKLVINGNPITIFQERDPSKIKWGDAGAEYVVESTGVFTTMEKAGAHLQGGAKRVIISAPSADAPMFVMGVNHEKYDNSLKIISNASCTTNCLAPLAKVIHDNFGIVEGLMTTVHAITATQKTVDGPSGKLWRDGRGALQNIIPASTGAAKAVGKVIPELNGKLTGMAFRVPTANVSVVDLTCRLEKPAKYDDIKKVVKQASEGPLKGILGYTEHQVVSSDFNSDTHSSTFDAGAGIALNDHFVKLISWYDNEFGYSNRVVDLMAHMASKE

SEQ ID NO: 56 - protein, 180 aa, Homo sapiens
MLCLLLTLGVALVCGVPAMDIPQTKQDLELPKLAGTWHSMAMATNNISLMATLKAPLRVHITSLLPTPEDNLEIVLHRWENNSCVEKKVLGEKTENPKKFKINYTVANEATLLDTDYDNFLFLCLQDTTTPIQSMMCQYLARVLVEDDEIMQGFIRAFRPLPRHLWYLLDLKQMEEPCRF

SEQ ID NO: 57 - protein, 684 aa, Homo sapiens
MARHRNVRGYNYDEDFEDDDLYGQSVEDDYCISPSTAAQFIYSRRDKPSVEPVEEYDYEDLKESSNSVSNHQLSGFDQARLYSCLDHMREVLGDAVPDEILIEAVLKNKFDVQKALSGVLEQDRVQSLKDKNEATVSTGKIAKGKPVDSQTSRSESEIVPKVAKMTVSGKKQTMGFEVPGVSSEENGHSFHTPQKGPPIEDAIASSDVLETASKSANPPHTIQASEEQSSTPAPVKKSGKLRQQIDVKAELEKRQGGKQLLNLVVIGHVDAGKSTLMGHMLYLLGNINKRTMHKYEQESKKAGKASFAYAWVLDETGEERERGVTMDVGMTKFETTTKVITLMDAPGHKDFIPNMITGAAQADVAVLVVDASRGEFEAGFETGGQTREHGLLVRSLGVTQLAVAVNKMDQVNWQQERFQEITGKLGHFLKQAGFKESDVGFIPTSGLSGENLITRSQSSELTKWYKGLCLLEQIDSFKPPQRSIDKPFRLCVSDVFKDQGSGFCITGKIEAGYIQTGDRLLAMPPNETCTVKGITLHDEPVDWAAAGDHVSLTLVGMDIIKINVGCIFCGPKVPIKACTRFRARILIFNIEIPITKGFPVLLHYQTVSEPAVIKRLISVLNKSTGEVTKKKPKFLTKGQNALVELQTQRPIALELYKDFKELGRFMLRYGGSTIAAGVVTEIKE

SEQ ID NO: 58 - protein, 646 aa, Homo sapiens
MSKGPAVGIDLGTTYSCVGVFQHGKVEIIANDQGNRTTPSYVAFTDTERLIGDAAKNQVAMNPTNTVFDAKRLIGRRFDDAVVQSDMKHWPFMVVNDAGRPKVQVEYKGETKSFYPEEVSSMVLTKMKEIAEAYLGKTVTNAVVTVPAYFNDSQRQATKDAGTIAGLNVLRIINEPTAAAIAYGLDKKVGAERNVLIFDLGGGTFDVSILTIEDGIFEVKSTAGDTHLGGEDFDNRMVNHFIAEFKRKHKKDISENKRAVRRLRTACERAKRTLSSSTQASIEIDSLYEGIDFYTSITRARFEELNADLFRGTLDPVEKALRDAKLDKSQIHDIVLVGGSTRIPKIQKLLQDFFNGKELNKSINPDEAVAYGAAVQAAILSGDKSENVQDLLLLDVTPLSLGIETAGGVMTVLIKRNTTIPTKQTQTFTTYSDNQPGVLIQVYEGERAMTKDNNLLGKFELTGIPPAPRGVPQIEVTFDIDANGILNVSAVDKSTGKENKITITNDKGRLSKEDIERMVQEAEKYKAEDEKQRDKVSSKNSLESYAFNMKATVEDEKLQGKINDEDKQKILDKCNEIINWLDKNQTAEKEEFEHQQKELEKVCNPIITKLYQSAGGMPGGMPGGFPGGGAPPSGGASSGPTIEEVD

SEQ ID NO: 59 - protein, 724 aa, Homo sapiens
MPEEVHHGEEEVETFAFQAEIAQLMSLIINTFYSNKEIFLRELISNASDALDKIRYESLTDPSKLDSGKELKIDIIPNPQERTLTLVDTGIGMTKADLINNLGTIAKSGTKAFMEALQAGADISMIGQFGVGFYSAYLVAEKVVVITKHNDDEQYAWESSAGGSFTVRADHGEPIGRGTKVILHLKEDQTEYLEERRVKEVVKKHSQFIGYPITLYLEKEREKEISDDEAEEEKGEKEEEDKDDEEKPKIEDVGSDEEDDSGKDKKKKTKKIKEKYIDQEELNKTKPIWTRNPDDITQEEYGEFYKSLTNDWEDHLAVKHFSVEGQLEFRALLFIPRRAPFDLFENKKKKNNIKLYVRRVFIMDSCDELIPEYLNFIRGVVDSEDLPLNISREMLQQSKILKVIRKNIVKKCLELFSELAEDKENYKKFYEAFSKNLKLGIHEDSTNRRRLSELLRYHTSQSGDEMTSLSEYVSRMKETQKSIYYITGESKEQVANSAFVERVRKRGFEVVYMTEPIDEYCVQQLKEFDGKSLVSVTKEGLELPEDEEEKKKMEESKAKFENLCKLMKEILDKKVEKVTISNRLVSSPCCIVTSTYGWTANMERIMKAQALRDNSTMGYMMAKKHLEINPDHPIVETLRQKAEADKNDKAVKDLVVLLFETALLSSGFSLEDPQTHSNRIYRMIKLGLGIDEDEVAAEEPNAAVPDEIPPLEGDEDASRMEEVD

SEQ ID NO: 60 - protein, 639 aa, Homo sapiens
MSARGPAIGIDLGTTYSCVGVFQHGKVEIIANDQGNRTTPSYVAFTDTERLIGDAAKNQVAMNPTNTIFDAKRLIGRKFEDATVQSDMKHWPFRVVSEGGKPKVQVEYKGETKTFFPEEISSMVLTKMKEIAEAYLGGKVHSAVITVPAYFNDSQRQATKDAGTITGLNVLRIINEPTAAAIAYGLDKKGCAGGEKNVLIFDLGGGTFDVSILTIEDGIFEVKSTAGDTHLGGEDFDNRMVSHLAEEFKRKHKKDIGPNKRAVRRLRTACERAKRTLSSSTQASIEIDSLYEGVDFYTSITRARFEELNADLFRGTLEPVEKALRDAKLDKGQIQEIVLVGGSTRIPKIQKLLQDFFNGKELNKSINPDEAVAYGAAVQAAILIGDKSENVQDLLLLDVTPLSLGIETAGGVMTPLIKRNTTIPTKQTQTFTTYSDNQSSVLVQVYEGERAMTKDNNLLGKFDLTGIPPAPRGVPQIEVTFDIDANGILNVTAADKSTGKENKITITNDKGRLSKDDIDRMVQEAERYKSEDEANRDRVAAKNALESYTYNIKQTVEDEKLRGKISEQDKNKILDKCQEVINWLDRNQMAEKDEYEHKQKELERVCNPIISKLYQGGPGGGSGGGGSGASGGPTIEEVD

SEQ ID NO: 61 - protein, 147 aa, Homo sapiens
MVHLTPEEKTAVNALWGKVNVDAVGGEALGRLLVVYPWTQRFFESFGDLSSPDAVMGNPKVKAHGKKVLGAFSDGLAHLDNLKGTFSQLSELHCDKLHVDPENFRLLGNVLVCVLARNFGKEFTPQMQAAYQKVVAGVANALAHKYH

SEQ ID NO: 62 - protein, 353 aa, Homo sapiens
MEKTLETVPLERKKREKEQFRKLFIGGLSFETTEESLRNYYEQWGKLTDCVVMRDPASKRSRGFGFVTFSSMAEVDAAMAARPHSIDGRVVEPKRAVAREESGKPGAHVTVKKLFVGGIKEDTEEHHLRDYFEEYGKIDTIEIITDRQSGKKRGFGFVTFDDHDPVDKIVLQKYHTINGHNAEVRKALSRQEMQEVQSSRSGRGGNFGFGDSRGGGGNFGPGPGSNFRGGSDGYGSGRGFGDGYNGYGGGPGGGNFGGSPGYGGGRGGYGGGGPGYGNQGGGYGGGYDNYGGGNYGSGNYNDFGNYNQQPSNYGPMKSGNFGGSRNMGGPYGGGNYGPGGSGGSGGYGGRSRY

SEQ ID NO: 63 - protein, 130 aa, Homo sapiens
MSGRGKQGGKARAKAKTRSSRAGLQFPVGRVHRLLRKGNYSERVGAGAPVYLAAVLEYLTAEILELAGNAARDNKKTRIIPRHLQLAIRNDEELNKLLGRVTIAQGGVLPNIQAVLLPKKTESHHKAKGK

SEQ ID NO: 64 - protein, 103 aa, Homo sapiens [sequence omitted]

SEQ ID NO: 65 - protein, 254 aa, Homo sapiens
MQRPGEPGAARFGPPEGCADHRPHRYRSFMIEEILTEPPGPKGAAPAAAAAAAGELLKFGVQALLAARPFHSHLAVLKAEQAAVFKFPLAPLGCSGLSSALLAAGPGLPGAAGAPHLPLELQLRGKLEAAGPGEPGTKAKKGRRSRTVFTELQLMGLEKRFEKQKYLSTPDRIDLAESLGLSQLQVKTWYQNRRMKWKKIVLQGGGLESPTKPKGRPKKNSIPTSEQLTEQERAKDAEKPAEVPGEPSDRSRED

SEQ ID NO: 66 - protein, 270 aa, Homo sapiens
MSSYFVNSFCGRYPNGPDYQLHNYGDHSSVSEQFRDSASMHSGRYGYGYNGMDLSVGRSGSGHFGSGERARSYAASASAAPAEPRYSQPATSTHSPQPDPLPCSAVAPSPGSDSHHGGKNSLSNSSGASADAGSTHISSREGVGTASGAEEDAPASSEQASAQSEPSPAPPAQPQIYPWMRKLHISHDNIGGPEGKRARTAYTRYQTLELEKEFHFNRYLTRRRRIEIAHALCLSERQIKIWFQNRRMKWKKDNKLKSMSMAAAGGAFRP

SEQ ID NO: 67 - protein, 2850 aa, Homo sapiens
MPKLLQGVITVIDVFYQYATQHGEYDTLNKAELKELLENEFHQILKNPNDPDTVDIILQSLDRDHNKKVDFTEYLLMIFKLVQARNKIIGKDYCQVSGSKLRDDTHQHQEEQEETEKEENKRQESSFSHSSWSAGENDSYSRNVRGSLKPGTESISRRLSFQRDFSGQHNSYSGQSSSYGEQNSDSHQSSGRGQCGSGSGQSPNYGQHGSGSGQSSSNDTHGSGSGQSSGFSQHKSSSGQSSGYSQHGSGSGHSSGYGQHGSRSGQSSRGERHRSSSGSSSSYGQHGSGSRQSLGHGRQGSGSRQSPSHVRHGSGSGHSSSHGQHGSGSSYSYSRGHYESGSGQTSGFGQHESGSGQSSGYSKHGSGSGHSSSQGQHGSTSGQASSSGQHGSSSRQSSSYGQHESASRHSSGRGQHSSGSGQSPGHGQRGSGSGQSPSSGQHGTGFGRSSSSGPYVSGSGYSSGFGHHESSSEHSSGYTQHGSGSGHSSGHGQHGSRSGQSSRGERQGSSAGSSSSYGQHGSGSRQSLGHSRHGSGSGQSPSPSRGRHESGSRQSSSYGPHGYGSGRSSSRGPYESGSGHSSGLGHQESRSGQSSGYGQHGSSSGHSSTHGQHGSTSGQSSSCGQHGATSGQSSSHGQHGSGSSQSSRYGQQGSGSGQSPSRGRHGSDFGHSSSYGQHGSGSGWSSSNGPHGSVSGQSSGFGHKSGSGQSSGYSQHGSGSSHSSGYRKHGSRSGQSSRSEQHGSSSGLSSSYGQHGSGSHQSSGHGRQGSGSGHSPSRVRHGSSSGHSSSHGQHGSGTSCSSSCGHYESGSGQASGFGQHESGSGQGYSQHGSASGHFSSQGRHGSTSGQSSSSGQHDSSSGQSSSYGQHESASHHASGRGRHGSGSGQSPGHGQRGSGSGQSPSYGRHGSGSGRSSSSGRHGSGSGQSSGFGHKSSSGQSSGYTQHGSGSGHSSSYEQHGSRSGQSSRSEQHGSSSGSSSSYGQHGSGSRQSLGHGQHGSGSGQSPSPSRGRHGSGSGQSSSYGPYRSGSGWSSSRGPYESGSGHSSGLGHRESRSGQSSGYGQHGSSSGHSSTHGQHGSTSGQSSSCGQHGASSGQSSSHGQHGSGSSQSSGYGRQGSGSGQSPGHGQRGSGSRQSPSYGRHGSGSGRSSSSGQHGSGLGESSGFGHHESSSGQSSSYSQHGSGSGHSSGYGQHGSRSGQSSRGERHGSSSGSSSHYGQHGSGSRQSSGHGRQGSGSGHSPSRGRHGSGLGHSSSHGQHGSGSGRSSSRGPYESRSGHSSVFGQHESGSGHSSAYSQHGSGSGHFCSQGQHGSTSGQSSTFDQEGSSTGQSSSYGHRGSGSSQSSGYGRHGAGSGQSPSRGRHGSGSGHSSSYGQHGSGSGWSSSSGRHGSGSGQSSGFGHHESSSWQSSGCTQHGSGSGHSSSYEQHGSRSGQSSRGERHGSSSGSSSSYGQHGSGSRQSLGHGQHGSGSGQSPSPSRGRHGSGSGQSSSYSPYGSGSGWSSSRGPYESGSSHSSGLGHRESRSGQSSGYGQHGSSSGHSSTHGQHGSTSGQSSSCGQHGASSGQSSSHGQHGSGSSQSSGYGRQGSGSGQSPGHGQRGSGSRQSPSYGRHGSGSGRSSSSGQHGSGLGESSGFGHHESSSGQSSSYSQHGSGSGHSSGYGQHGSRSGQSSRGERHGSSSRSSSRYGQHGSGSRQSSGHGRQGSGSGQSPSRGRHGSGLGHSSSHGQHGSGSGRSSSRGPYESRSGHSSVFGQHESGSGHSSAYSQHGSGSGHFCSQGQHGSTSGQSSTFDQEGSSTGQSSSHGQHGSGSSQSSSYGQQGSGSGQSPSRGRHGSGSGHSSSYGQHGSGSGWSSSSGRHGSGSGQSSGFGHHESSSWQSSGYTQHGSGSGHSSSYEQHGSRSGQSSRGEQHGSSSGSSSSYGQHGSGSRQSLGHGQHGSGSGQSPSPSRGRHGSGSGQSSSYGPYGSGSGWSSSRGPYESGSGHSSGLGHRESRSGQSSGYGQHGSSSGHSSTHGQHGSASGQSSSCGQHGASSGQSSSHGQHGSGSSQSSGYGRQGSGSGQSPGHGQRGSGSRQSPSYGRHGSGSGRSSSSGQHGPGLGESSGFGHHESSSGQSSSYSQHGSGSGHSSGYGQHGSRSGQSSRGERHGSSSGSSSRYGQHGSGSRQSSGHGRQGSGSGHSPSRGRHGSGSGHSSSHGQHGSGSGRSSSRGPYESRSGHSSVFGQHESGSGHSSAYSQHGSGSGHFCSQGQHGSTSGQSSTFDQEGSSTGQSSSHGQHGSGSSQSSSYGQQGSGSGQSPSRGRHGSGSGHSSSYGQHGSGSGWSSSSGRHGSGSGQSSGFGHHESSSWQSSGYTQHGSGSGHSSSYEQHGSRSGQSSRGERHGSSSGSSSSYGQHGSGSRQSLGHGQHGSGSGQSPSPSRGRHGSGSGQSSSYSPYGSGSGWSSSRGPYESGSGHSSGLGHRESRSGQSSGYGQHGSSSGHSSTHGQHGSTSGQSSSCGQHGASSGQSSSHGQHGSGSSQSSGYGRQGSGSGQSPGHGQRGSGSRQSPSYGRHGSGSGRSSSSGQHGSGLGESSGFGHHESSSGQSSSYSQHGSGSGHSSGYGQHGSRSGQSSRGERHGSSSGSSSHYGQHGSGSRQSSGHGRQGSGSGQSPSRGRHGSGLGHSSSHGQHGSGSGRSSSRGPYESRLGHSSVFGQHESGSGHSSAYSQHGSGSGHFCSQGQHGSTSGQSSTFDQEGSSTGQSSSYGHRGSGSSQSSGYGRHGAGSGQSLSHGRHGSGSGQSSSYGQHGSGSGQSSGYSQHGSGSGQDGYSYCKGGSNHDGGSSGSYFLSFPSSTSPYEYVQEQRCYFYQ

SEQ ID NO: 68 - protein, 539 aa, Homo sapiens
MGEKASYCNCNFCVSKVECSFLYFLYWSYFKERDKEVSDDEAEEKEDKEEEKEKEEKESEDKPEIEDVGSDEEEEKKDGDKKKKKKIKEKYIDQEELNKTKPIWTRNPDDITNEEYGEFYKSLTNDWEDHLAVKHFSVEGQLEFRALLFVPRRAPFDLFENRKKKNNIKLYVRRVFIMDNCEELIPEYLNFIRGVVDSEDLPLNISREMLQQSKILKVIRKNLVKKCLELFTELAEDKENYKKFYEQFSKNIKLGIHEDSQNRKKLSELLRYYTSASGDEMVSLKDYCTRMKENQKHIYYITGETKDQVANSAFVERLRKHGLEVIYMIEPIDEYCVQQLKEFEGKTLVSVTKEGLELPEDEEEKKKQEEKKTKFENLCKIMKDILEKKVEKVVVSNRLVTSPCCIVTSTYGWTANMERIMKAQALRDNSTMGYMAAKKHLEINPDHSIIETLRQKAEADKNDKSVKDLVILLYETALLSSGFSLEDPQTHANRIYRMIKLGLGIDEDDPTADDTSAAVTEEMPPLEGDDDTSRMEEVD

SEQ ID NO: 69 - protein, 1812 aa, Homo sapiens
MAVDSAMELLFLDTFKHPSAEQSSHIDVVRFPCVVYINEVRVIPPGVRAHSSLPDNRAYGETSPHTFQLDLFFNNVSKPSAPVFDRLGSLEYDENTSIIFRPNSKVNTDGLVLRGWYNCLTLAIYGSVDRVISHDRDSPPPPPPPPPPPQPQPSLKRNPKHADGEKEDQFNGSPPRPQPRGPRTPPGPPPPDDDEDDPVPLPVSGDKEEDAPHREDYFEPISPDRNSVPQEGQYSDEGEVEEEQQEEGEEDEDDVDVEEEEDEDEDDRRTVDSIPEEEEEDEEEEGEEDEEGEGDDGYEQISSDEDGIADLERETFKYPNFDVEYTAEDLASVPPMTYDPYDRELVPLLYFSCPYKTTFEIEISRMKDQGPDKENSGAIEASVKLTELLDLYREDRGAKWVTALEEIPSLIIKGLSYLQLKNTKQDSLGQLVDWTMQALNLQVALRQPIALNVRQLKAGTKLVSSLAECGAQGVTGLLQAGVISGLFELLFADHVSSSLKLNAFKALDSVISMTEGMEAFLRGRQNEKSGYQKLLELILLDQTVRVVTAGSAILQKCHFYEVLSEIKRLGDHLAEKTSSLPNHSEPDHDTDAGLERTNPEYENEVEASMDMDLLESSNISEGEIERLINLLEEVFHLMETAPHTMIQQPVKSFPTMARITGPPERDDPYPVLFRYLHSHHFLELVTLLLSIPVTSAHPGVLQATKDVLKFLAQSQKGLLFFMSEYEATNLLIRALCHFYDQDEEEGLQSDGVIDDAFALWLQDSTQTLQCITELFSHFQRCTASEETDHSDLLGTLHNLYLITFNPVGRSAVGHVFSLEKNLQSLITLMEYYSKEALGDSKSKKSVAYNYACILILVVVQSSSDVQMLEQHAASLLKLCKADENNAKLQELGKWLEPLKNLRFEINCIPNLIEYVKQNIDNLMTPEGVGLTTALRVLCNVACPPPPVEGQQKDLKWNLAVIQLFSAEGMDTFIRVLQKLNSILTQPWRLHVNMGTTLHRVTTISMARCTLTLLKTMLTELLRGGSFEFKDMRVPSALVTLHMLLCSIPLSGRLDSDEQKIQNDIIDILLTFTQGVNEKLTISEETLANNTWSLMLKEVLSSILKVPEGFFSGLILLSELLPLPLPMQTTQVIEPHDISVALNTRKLWSMHLHVQAKLLQEIVRSFSGTTCQPIQHMLRRICVQLCDLASPTALLIMRTVLDLIVEDLQSTSEDKEKQYTSQTTRLLALLDALASHKACKLAILHLINGTIKGDERYAEIFQDLLALVRSPGDSVIRQQCVEYVTSILQSLCDQDIALILPSSSEGSISELEQLSNSLPNKELMTSICDCLLATLANSESSYNCLLTCVRTMMFLAEHDYGLFHLKSSLRKNSSALHSLLKRVVSTFSKDTGELASSFLEFMRQILNSDTIGCCGDDNGLMEVEGAHTSRTMSINAAELKQLLQSKEESPENLFLELEKLVLEHSKDDDNLDSLLDSVVGLKQMLESSGDPLPLSDQDVEPVLSAPESLQNLFNNRTAYVLADVMDDQLKSMWFTPFQAEEIDTDLDLVKVDLIELSEKCCSDFDLHSELERSFLSEPSSPGRTKTTKGFKLGKHKHETFITSSGKSEYIEPAKRAHVVPPPRGRGRGGFGQGIRPHDIFRQRKQNTSRPPSMHVDDFVAAESKEVVPQDGIPPPKRPLKVSQKISSRGGFSGNRGGRGAFHSQNRFFTPPASKGNYSRREGTRGSSWSAQNTPRGNYNESRGGQSNFNRGPLPPLRPLSSTGYRPSPRDRASRGRGGLGPSWASANSGSGGSRGKFVSGGSGRGRHVRSFTR

SEQ ID NO: 70 - protein, 232 aa, Homo sapiens
MAGITTIEAVKRKIQVLQQQADDAEERAERLQREVEGERRAREQAEAEVASLNRRIQLVEEELDRAQERLATALQKLEEAEKAADEEKMELQEIQLKEAKHIAEEADRKYEEVARKLVIIEGDLERTEERAELAESRCREMDEQIRLMDQNLKCLSAAEEKYSQKEDKYEEEIKILTDKLKEAETRAEFAERSVAKLEKTIDDLEDKLKCTKEEHLCTQRMLDQTLLDLNEM

SEQ ID NO: 71 - protein, 747 aa, Homo sapiens
MEVKRLKVTELRSELQRRGLDSRGLKVDLAQRLQEALDAEMLEDEAGGGGAGPGGACKAEPRPVAASGGGPGGDEEEDEEEEEEDEEALLEDEDEEPPPAQALGQAAQPPPEPPEAAAMEAAAEPDASEKPAEATAGSGGVNGGEEQGLGKREEDEPEERSGDETPGSEVPGDKAAEEQGDDQDSEKSKPAGSDGERRGVKRQRDEKDEHGRAYYEFREEAYHSRSKSPLPPEEEAKDEEEDQTLVNLDTYTSDLHFQVSKDRYGGQPLFSEKFPTLWSGARSTYGVTKGKVCFEAKVTQNLPMKEGCTEVSLLRVGWSVDFSRPQLGEDEFSYGFDGRGLKAENGQFEEFGQTFGENDVIGCFANFETEEVELSFSKNGEDLGVAFWISKDSLADRALLPHVLCKNCVVELNFGQKEEPFFPPPEEFVFIHAVPVEERVRTAVPPKTIEECEVILMVGLPGSGKTQWALKYAKENPEKRYNVLGAETVLNQMRMKGLEEPEMDPKSRDLLVQQASQCLSKLVQIASRTKRNFILDQCNVYNSGQRRKLLLFKTFSRKVVVVVPNEEDWKKRLELRKEVEGDDVPESIMLEMKANFSLPEKCDYMDEVTYGELEKEEAQPIVTKYKEEARKLLPPSEKRTNRRNNRNKRNRQNRSRGQGYVGGQRRGYDNRAYGQQYWGQPGNRGGYRNFYDRYRGDYDRFYGRDYEYNRYRDYYRQYNRDWQSYYYHHPQDRDRYYRNYYGYQGYR

SEQ ID NO: 72 - protein, 2539 aa, Homo sapiens [sequence omitted]

SEQ ID NO: 73 - protein, 204 aa, Homo sapiens
MNRVNDPLIFIRDIKPGLKNLNVVFIVLEIGRVTKTKDGHEVRSCKVADKTGSITISVWDEIGGLIQPGDIIRLTRGYASMWKGCLTLYTGRGGELQKIGEFCMVYSEVPNFSEPNPDYRGQQNKGAQSEQKNNSMNSNMGTGTFGPVGNGVHTGPESREHQFSHAGRSNGRGLINPQLQGTASNQTVMTTISNGRDPRRAFKR

SEQ ID NO: 74 - protein, 843 aa, Homo sapiens
MPQCPTLESQEGENSEEKGDSSKEDPKETVALAFVRENPGAQNGLQNAQQQGKKKRKKKRLVINLSSCRYESVRRAAQQYGFREGGEDDDWTLYWTDYSVSLERVMEMKSYQKINHFPGMSEICRKDLLARNMSRMLKMFPKDFRFFPRTWCLPADWGDLQTYSRSRKNKTYICKPDSGCQGKGIFITRTVKEIKPGEDMICQLYISKPFIIDGFKFDLRIYVLVTSCDPLRIFVYNEGLARFATTSYSRPCTDNLDDICMHLTNYSINKHSSNFSRDAHSGSKRKLSTFSAYLEDHSYNVEQIWRDIEDVIIKTLISAHPIIRHNYHTCFPNHTLNSACFEILGFDILLDHKLKPWLLEVNHSPSFSTDSRLDKEVKDGLLYDTLVLINLESCDKKKVLEEERQRGQFLQQCCSREMRIEEAKGFRAVQLKKTETYEKENCGGFRLIYPSLNSEKYEKFFQDNNSLFQNTVASRAREEYARQLIQELRLKREKKPFQMKKKVEMQGESAGEQVRKKGMRGWQQKQQQKDKAATQASKQYIQPLTLVSYTPDLLLSVRGERKNETDSSLNQEAPTEEASSVFPKLTSAKPFSSLPDLRNINLSSSKLEPSKPNFSIKEAKSASAVNVFTGTVHLTSVETTPESTTQLSISPKSPPTLAVTASSEYSGPETDRVVSFKCKKQQTPPHLTQKKMLKSFLPTKSKSFWESPNTNWTLLKSDMNKPHLISELLTKLQLSGKLSFFPAHYNPKLGMNNLSQNPSLPGECHSRSDSSGEKRQLDVSSLLLQSPQSYNVTLRDLLVIATPAQLDPRPCRSHASAMRDPCMQDQEAYSHCLISGQKGCERS

SEQ ID NO: 75 - protein, 962 aa, Homo sapiens
MISTRVMDIKLREAAEGLGEDSTGKKKSKFKTFKKFFGKKKRKESPSSTGSSTWKQSQTRNEVIAIESGPVGYDSEDELEESRGTLGSRALSHDSIFIPESGQDATRPVRVFSQENVCDRIKALQLKIQCNVKMGPPPPPGGLPAKRGEDAGMSSEDDGLPRSPPEMSLLHDVGPGTTIKVSVVSPDHVSDSTVSARISDNSLAPVADFSYPAESSSCLDNSAAKHKLQVKPRNQRSSKMRRLSSRAQSESLSDLTCTPEEEENEEKPLLEVSPEERPSSGQQDVAPDRGPEPGPPAPLPPPGGARARRARLQHSSALTASVEEGGVPGEDPSSRPATPELAEPESAPTLRVEPPSPPEGPPNPGPDGGKQDGEAPPAGPCAPATDKAEEVVCAPEDVASPFPTAIPEGDTTPPETDPAATSEAPSARDGPERSVPKEAEPTPPVLPDEEKGPPGPAPEPEREAETEPERGAGTEPERIGTEPSTAPAPSPPAPKSCLKHRPAAASEGPAASPPLAAAESPPVEPGPGSLDAEAAAPERPKAERAEAPPAGAERAAPERKAERGGAELRGAKKFSVSSCRARPRPGVSRPLERASGRLPLARSGPVWRSEAALDDLQGLPEPQHAKPGPRKLAERGPQDSGDRAASPAGPRKSPQEAAAAPGTREPCPAAQEPAPSEDRNPFPVKLRSTSLSLKYRDGASQEVKGVKRYSAEVRLERSLTVLPKEEKCPLGTAPALRGTRAPSDQGKGKARPPEPLSSKPPLPRKPLLQSFTLPHQPAPPDAGPGEREPRKEPRTAEKRPLRRGAEKSLPPAATGPGADGQPAPPWITVTRQKRRGTLDQPPNQEDKPGARTLKSEPGKQAKVPERGQEPVKQADFVRSKSFLITPVKPAVDRKQGAKLNFKEGLQRGISLSHQNLAQSAVMMEKELHQLKRASYASTDQPSWMELARKKSQAWSDMPQIIK

SEQ ID NO: 76 - protein, 133 aa, Homo sapiens
MEEDQELERKISGLKTSMAEGERKTALEMVQAAGTDRHCVTFVLHEEDHTLGNSLRYMIMKNPEVEFCGYTTTHPSESKINLRIQTRGTLPAVEPFQRGLNELMNVCQHVLDKFEASIKDYKDQKASRNESTF

SEQ ID NO: 77 - protein, 574 aa, Homo sapiens
MALKGRALYDFHSENKEEISIQQDEDLVIFSETSLDGWLQGQNSRGETGLFPASYVEIVRSGISTNHADYSSSPAGSPGAQVSLYNSPSVASPARSGGGSGFLSNQGSFEEDDDDDWDDWDDGCTVVEEPRAGGLGTNGHPPLNLSYPGAYPSQHMAFRPKPPLERQDSLASAKRGSVVGRNLNRFSCFVRSGVEAFILGDVPMMAKIAETYSIEMGPRGPQWKANPHPFACSVEDPTKQTKFKGIKSYISYKLTPTHAASPVYRRYKHFDWLYNRLLHKFTVISVPHLPEKQATGRFEEDFIEKRKRRLILWMDHMTSHPVLSQYEGFQHFLSCLDDKQWKMGKRRAEKDEMVGASFLLTFQIPTEHQDLQDVEDRVDTFKAFSKKMDDSVLQLSTVASELVRKHVGGFRKEFQKLGSAFQAISHSFQMDPPFCSEALNSAISHTGRTYEAIGEMFAEQPKNDLFQMLDTLSLYQGLLSNFPDIIHLQKGAFAKVKESQRMSDEGRMVQDEADGIRRRCRVVGFALQAEMNHFHQRRELDFKHMMQNYLRQQILFYQRVGQQLEKTLRMYDNL

SEQ ID NO: 78 - protein, 330 aa, Homo sapiens [sequence omitted]

SEQ ID NO: 79 - protein, 115 aa, Homo sapiens
EDIVMTQTPLSLPVTPGEPASISCRSSQSLLDSGDGNTYLNWYLQKAGQSPQLLIYTLSYRASGVPDRFSGSGSGTDFTLKISRVQAEDVGVYYCMQRLEIPYTFGQGTKLEIRR

SEQ ID NO: 80 - protein, 109 aa, Homo sapiens [sequence omitted]

SEQ ID NO: 81 - protein, 365 aa, Homo sapiens
MGVPRPQPWALGLLLFLLPGSLGAESHLSLLYHLTAVSSPAPGTPAFWVSGWLGPQQYLSYNSLRGEAEPCGAWVWENQVSWYWEKETTDLRIKEKLFLEAFKALGGKGPYTLQGLLGCELGPDNTSVPTAKFALNGEEFMNFDLKQGTWGGDWPEALAISQRWQQQDKAANKELTFLLFSCPHRLREHLERGRGNLEWKEPPSMRLKARPSSPGFSVLTCSAFSFYPPELQLRFLRNGLAAGTGQGDFGPNSDGSFHASSSLTVKSGDEHHYCCIVQHAGLAQPLRVELESPAKSSVLVVGIVIGVLLLTAAAVGGALLWRRMRSGLPAPWISLRGDDTGVLLPTPGEAQDADLKDVNVIPATA

SEQ ID NO: 82 - protein, 353 aa, homo sapiens
ASPTSPKVFPLSLCSTQPDGNVVIACLVQGFFPQEPLSVTWSESGQGVTARNFPPSQDASGDLYTTSSQLTLPATQCLAGKSVTCHVKHYTNPSQDVTVPCPVPSTPPTPSPSTPPTPSPSCCHPRLSLHRPALEDLLLGSEANLTCTLTGLRDASGVTFTWTPSSGKSAVQGPPERDLCGCYSVSSVLPGCAEPWNHGKTFTCTAAYPESKTPLTATLSKSGNTFRPEVHLLPPPSEELALNELVTLTCLARGFSPKDVLVRWLQGSQELPREKYLTWASRQEPSQGTTTFAVTSILRVAAEDWKKGDTFSCMVGHEALPLAFTQKTIDRLAGKPTHVNVSVVMAEVDGTCY

SEQ ID NO: 83 - protein, 452 aa, homo sapiens
GSASAPTLFPLVSCENSPSDTSSVAVGCLAQDFLPDSITLSWKYKNNSDISSTRGFPSVLRGGKYAATSQVLLPSKDVMQGTDEHVVCKVQHPNGNKEKNVPLPVIAELPPKVSVFVPPRDGFFGNPRKSKLICQATGFSPRQIQVSWLREGKQVGSGVTTDQVQAEAKESGPTTYKVTSTLTIKESDWLGQSMFTCRVDHRGLTFQQNASSMCVPDQDTAIRVFAIPPSFASIFLTKSTKLTCLVTDLTTYDSVTISWTRQNGEAVKTHTNISESHPNATFSAVGEASICEDDWNSGERFTCTVTHTDLPSPLKQTISRPKGVALHRPDVYLLPPAREQLNLRESATITCLVTGFSPADVFVQWMQRGQPLSPEKYVTSAPMPEPQAPGRYFAHSILTVSEEEWNTGETYTCVAHEALPNRVTERTVDKSTGKPTLYNVSLVMSDTAGTCY

SEQ ID NO: 84 - protein, 106 aa, homo sapiens
TVAAPSVFIFPPSDEQLKSGTASVVCLLNNFYPREAKVQWKVDNALQSGNSQESVTEQDSKDSTYSLSSTLTLSKADYEKHKVYACEVTHQGLSSPVTKSFNRGEC

SEQ ID NO: 85 - protein, 106 aa, homo sapiens
GQPKAAPSVTLFPPSSEELQANKATLVCLISDFYPGAVTVAWKADSSPVKAGVETTTPSKQSNNKYAASSYLSLTPEQWKSHRSYSCQVTHEGSTVEKTVAPTECS

SEQ ID NO: 86 - protein, 159 aa, Homo sapiens
MKNHLLFWGVLAVFIKAVHVKAQEDERIVLVDNKCKCARITSRIIRSSEDPNEDIVERNIRIIVPLNNRENISDPTSPLRTRFVYHLSDLCKKCDPTEVELDNQIVTATQSNICDEDSATETCYTYDRNKCYTAVVPLVYGGETKMVETALTPDACYPD

SEQ ID NO: 87 - protein, 467 aa, Homo sapiens
MRTAPSLRRCVCLLLAAILDLARGYLTVNIEPLPPVVAGDAVTLKCNFKTDGRMREIVWYRVTDGGTIKQKIFTFDAMFSTNYSHMENYRKREDLVYQSTVRLPEVRISDNGPYECHVGIYDRATREKVVLASGNIFLNVMAPPTSIEVVAADTPAPFSRYQAQNFTLVCIVSGGKPAPMVYFKRDGEPIDAVPLSEPPAASSGPLQDSRPFRSLLHRDLDDTKMQKSLSLLDAENRGGRPYTERPSRGLTPDPNILLQPTTENIPETVVSREFPRWVHSAEPTYFLRHSRTPSSDGTVEVRALLTWTLNPQIDNEALFSCEVKHPALSMPMQAEVTLVAPKGPKIVMTPSRARVGDTVRILVHGFQNEVFPEPMFTWTRVGSRLLDGSAEFDGKELVLERVPAELNGSMYRCTAQNPLGSTDTHTRLIVFENPNIPRGTEDSNGSIGPTGARLTLVLALTVILELT

SEQ ID NO: 88 - protein, 1339 aa, Homo sapiens
MASPPRHGPPGPASGDGPNLNNNNNNNNNNHSVRKCGYLRKQKHGHKRFFVLRGPGAGGDEATAGGGSAPQPPRLEYYESEKKWRSKAGAPKRVIALDCCLNINKRADAKHKYLIALYTKDEYFAVAAENEQEQEGWYRALTDLVSEGRAAAGDAPPAAAPAASCSASLPGALGGSAGAAGAEDSYGLVAPATAAYREVWQVNLKPKGLGQSKNLTGVYRLCLSARTIGFVKLNCEQPSVTLQLMNIRRCGHSDSFFFIEVGRSAVTGPGELWMQADDSVVAQNIHETILEAMKALKELFEFRPRSKSQSSGSSATHPISVPGARRHHHLVNLPPSQTGLVRRSRTDSLAATPPAAKCSSCRVRTASEGDGGAAAGAAAAGARPVSVAGSPLSPGPVRAPLSRSHTLSGGCGGRGSKVALLPAGGALQHSRSMSMPVAHSPPAATSPGSLSSSSGHGSGSYPPPPGPHPPLPHPLHHGPGQRPSSGSASASGSPSDPGFMSLDEYGSSPGDLRAFCSHRSNTPESIAETPPARDGGGGGEFYGYMTMDRPLSHCGRSYRRVSGDAAQDLDRGLRKRTYSLTTPARQRPVPQPSSASLDEYTLMRATFSGSAGRLCPSCPASSPKVAYHPYPEDYGDIEIGSHRSSSSNLGADDGYMPMTPGAALAGSGSGSCRSDDYMPMSPASVSAPKQILQPRAAAAAAAAVPSAGPAGPAPTSAAGRTFPASGGGYKASSPAESSPEDSGYMRMWCGSKLSMEHADGKLLPNGDYLNVSPSDAVTTGTPPDFFSAALHPGGEPLRGVPGCCYSSLPRSYKAPYTCGGDSDQYVLMSSPVGRILEEERLEPQATPGPSQAASAFGAGPTQPPHPVVPSPVRPSGGRPEGFLGQRGRAVRPTRLSLEGLPSLPSMHEYPLPPEPKSPGEYINIDFGEPGARLSPPAPPLLASAASSSSLLSASSPASSLGSGTPGTSSDSRQRSPLSDYMNLDFSSPKSPKPGAPSGHPVGSLDGLLSPEASSPYPPLPPRPSASPSSSLQPPPPPPAPGELYRLPPASAVATAQGPGAASSLSSDTGDNGDYTEMAFGVAATPPQPIAAPPKPEAARVASPTSGVKRLSLMEQVSGVEAFLQASQPPDPHRGAKVIRADPQGGRRRHSSETFSSTTTVTPVSPSFAHNPKRHNSASVENVSLRKSSEGGVGVGPGGGDEPPTSPRQLQPAPPLAPQGRPWTPGQPGGLVGCPGSGGSPMRRETSAGFQNGLNYIAIDVREEPGLPPQPQPPPPPLPQPGDKSSWGRTRSLGGLISAVGVGSTGGGCGGPGPGALPPANTYASIDFLSHHLKEATIVK

SEQ ID NO: 89 - protein, 282 aa, Homo sapiens
MERPSLRALLLGAAGLLLLLLPLSSSSSSDTCGPCEPASCPPLPPLGCLLGETRDACGCCPMCARGEGEPCGGGGAGRGYCAPGMECVKSRKRRKGKAGAAAGGPGVSGVCVCKSRYPVCGSDGTTYPSGCQLRAASQRAESRGEKAITQVSKGTCEQGPSIVTPPKDIWNVTGAQVYLSCEVIGIPTPVLIWNKVKRGHYGVQRTELLPGDRDNLAIQTRGGPEKHEVTGWVLVSPLSKEDAGEYECHASNSQGQASASAKITVVDALHEIPVKKGEGAEL

SEQ ID NO: 90 - protein, 328 aa, Homo sapiens
MCHQQLVISWFSLVFLASPLVAIWELKKDVYVVELDWYPDAPGEMVVLTCDTPEEDGITWTLDQSSEVLGSGKTLTIQVKEFGDAGQYTCHKGGEVLSHSLLLLHKKEDGIWSTDILKDQKEPKNKTFLRCEAKNYSGRFTCWWLTTISTDLTFSVKSSRGSSDPQGVTCGAATLSAERVRGDNKEYEYSVECQEDSACPAAEESLPIEVMVDAVHKLKYENYTSSFFIRDIIKPDPPKNLQLKPLKNSRQVEVSWEYPDTWSTPHSYFSLTFCVQVQGKSKREKKDRVFTDKTSATVICRKNASISVRAQDRYYSSSWSEWASVPCS

SEQ ID NO: 91 - protein, 414 aa, Homo sapiens
MSKKISGGSVVEMQGDEMTRIIWELIKEKLIFPYVELDLHSYDLGIENRDATNDQVTKDAAEAIKKHNVGVKCATITPDEKRVEEFKLKQMWKSPNGTIRNILGGTVFREAIICKNIPRLVSGWVKPIIIGRHAYGDQYRATDFVVPGPGKVEITYTPSDGTQKVTYLVHNFEEGGGVAMGMYNQDKSIEDFAHSSFQMALSKGWPLYLSTKNTILKKYDGRFKDIFQEIYDKQYKSQFEAQKIWYEHRLIDDMVAQAMKSEGGFIWACKNYDGDVQSDSVAQGYGSLGMMTSVLVCPDGKTVEAEAAHGTVTRHYRMYQKGQETSTNPIASIFAWTRGLAHRAKLDNNKELAFFANALEEVSIETIEAGFMTKDLAACIKGLPNVQRSDYLNTFEFMDKLGENLKIKLAQAKL

SEQ ID NO: 92 - protein, 584 aa, Homo sapiens
MSVRYSSSKHYSSSRSGGGGGGGGCGGGGGVSSLRISSSKGSLGGGFSSGGFSGGSFSRGSSGGGCFGGSSGGYGGLGGFGGGSFRGSYGSSSFGGSYGGIFGGGSFGGGSFGGGSFGGGGFGGGGFGGGFGGGFGGDGGLLSGNEKVTMQNLNDRLASYLDKVRALEESNYELEGKIKEWYEKHGNSHQGEPRDYSKYYKTIDDLKNQILNLTTDNANILLQIDNARLAADDFRLKYENEVALRQSVEADINGLRRVLDELTLTKADLEMQIESLTEELAYLKKNHEEEMKDLRNVSTGDVNVEMNAAPGVDLTQLLNNMRSQYEQLAEQNRKDAEAWFNEKSKELTTEIDNNIEQISSYKSEITELRRNVQALEIELQSQLALKQSLEASLAETEGRYCVQLSQIQAQISALEEQLQQIRAETECQNTEYQQLLDIKIRLENEIQTYRSLLEGEGSSGGGGRGGGSFGGGYGGGSSGGGSSGGGHGGGHGGSSGGGYGGGSSGGGSSGGGYGGGSSSGGHGGSSSGGYGGGSSGGGGGGYGGGSSGGGSSSGGGYGGGSSSGGHKSSSSGSVGESSSKGPRY

SEQ ID NO: 93 - protein, 494 aa, Homo sapiens
MDLSNNTMSLSVRTPGLSRRLSSQSVIGRPRGMSASSVGSGYGGSAFGFGASCGGGFSAASMFGSSSGFGGGSGSSMAGGLGAGYGRALGGGSFGGLGMGFGGSPGGGSLGILSGNDGGLLSGSEKETMQNLNDRLASYLDKVRALEEANTELENKIREWYETRGTGTADASQSDYSKYYPLIEDLRNKIISASIGNAQLLLQIDNARLAAEDFRMKYENELALRQGVEADINGLRRVLDELTLTRTDLEMQIESLNEELAYMKKNHEDELQSFRVGGPGEVSVEMDAAPGVDLTRLLNDMRAQYETIAEQNRKDAEAWFIEKSGELRKEISTNTEQLQSSKSEVTDLRRAFQNLEIELQSQLAMKKSLEDSLAEAEGDYCAQLSQVQQLISNLEAQLLQVRADAERQNVDHQRLLNVKARLELEIETYRRLLDGEAQGDGLEESLFVTDSKSQAQSTDSSKDPTKTRKIKTVVQEMVNGEVVSSQVQEIEELM

SEQ ID NO: 94 - protein, 472 aa, Homo sapiens
MTTCSRQFTSSSSMKGSCGIGGGIGGGSSRISSVLAGGSCRAPSTYGGGLSVSSSRFSSGGACGLGGGYGGGFSSSSSSFGSGFGGGYGGGLGAGLGGGFGGGFAGGDGLLVGSEKVTMQNLNDRLASYLDKVRALEEANADLEVKIRDWYQRQRPAEIKDYSPYFKTIEDLRNKILTATVDNANVLLQIDNARLAADDFRTKYETELNLRMSVEADINGLRRVLDELTLARADLEMQIESLKEELAYLKKNHEEEMNALRGQVGGDVNVEMDAAPGVDLSRILNEMRDQYEKMAEKNRKDAEEWFFTKTEELNREVATNSELVQSGKSEISELRRTMQNLEIELQSQLSMKASLENSLEETKGRYCMQLAQIQEMIGSVEEQLAQLRCEMEQQNQEYKILLDVKTRLEQEIATYRRLLEGEDAHLSSSQFSSGSQSSRDVTSSSRQIRTKVMDVHDGKVVSTHEQVLRTKN

SEQ ID NO: 95 - protein, 473 aa, Homo sapiens
MTTCSRQFTSSSSMKGSCGIGGGIGGGSSRISSVLAGGSCRAPSTYGGGLSVSSRFSSGGACGLGGGYGGGFSSSSSFGSGFGGGYGGGLGAGFGGGLGAGFGGGFAGGDGLLVGSEKVTMQNLNDRLASYLDKVRALEEANADLEVKIRDWYQRQRPSEIKDYSPYFKTIEDLRNKIIAATIENAQPILQIDNARLAADDFRTKYEHELALRQTVEADVNGLRRVLDELTLARTDLEMQIEGLKEELAYLRKNHEEEMLALRGQTGGDVNVEMDAAPGVDLSRILNEMRDQYEQMAEKNRRDAETWFLSKTEELNKEVASNSELVQSSRSEVTELRRVLQGLEIELQSQLSMKASLENSLEETKGRYCMQLSQIQGLIGSVEEQLAQLRCEMEQQSQEYQILLDVKTRLEQEIATYRRLLEGEDAHLSSQQASGQSYSSREVFTSSSSSSSRQTRPILKEQSSSSFSQGQSS

SEQ ID NO: 96 - protein, 400 aa, Homo sapiens [sequence omitted]

SEQ ID NO: 97 - protein, 623 aa, Homo sapiens
MSCRQFSSSYLSRSGGGGGGGLGSGGSIRSSYSRFSSSGGGGGGGRFSSSSGYGGGSSRVCGRGGGGSFGYSYGGGSGGGFSASSLGGGFGGGSRGFGGASGGGYSSSGGFGGGFGGGSGGGFGGGYGSGFGGFGGFGGGAGGGDGGILTANEKSTMQELNSRLASYLDKVQALEEANNDLENKIQDWYDKKGPAAIQKNYSPYYNTIDDLKDQIVDLTVGNNKTLLDIDNTRMTLDDFRIKFEMEQNLRQGVDADINGLRQVLDNLTMEKSDLEMQYETLQEELMALKKNHKEEMSQLTGQNSGDVNVEINVAPGKDLTKTLNDMRQEYEQLIAKNRKDIENQYETQITQIEHEVSSSGQEVQSSAKEVTQLRHGVQELEIELQSQLSKKAALEKSLEDTKNRYCGQLQMIQEQISNLEAQITDVRQEIECQNQEYSLLLSIKMRLEKEIETYHNLLEGGQEDFESSGAGKIGLGGRGGSGGSYGRGSRGGSGGSYGGGGSGGGYGGGSGSRGGSGGSYGGGSGSGGGSGGGYGGGSGGGHSGGSGGGHSGGSGGNYGGGSGSGGGSGGGYGGGSGSRGGSGGSHGGGSGFGGESGGSYGGGEEASGSGGGYGGGSGKSSHS

SEQ ID NO: 98 - protein, 644 aa, Homo sapiens
MSRQFSSRSGYRSGGGFSSGSAGIINYQRRTTSSSTRRSGGGGGRFSSCGGGGGSFGAGGGFGSRSLVNLGGSKSISISVARGGGRGSGFGGGYGGGGFGGGGFGGGGFGGGGIGGGGFGGFGSGGGGFGGGGFGGGGYGGGYGPVCPPGGIQEVTINQSLLQPLNVEIDPEIQKVKSREREQIKSLNNQFASFIDKVRFLEQQNQVLQTKWELLQQVDTSTRTHNLEPYFESFINNLRRRVDQLKSDQSRLDSELKNMQDMVEDYRNKYEDEINKRTNAENEFVTIKKDVDGAYMTKVDLQAKLDNLQQEIDFLTALYQAELSQMQTQISETNVILSMDNNRSLDLDSIIAEVKAQYEDIAQKSKAEAESLYQSKYEELQITAGRHGDSVRNSKIEISELNRVIQRLRSEIDNVKKQISNLQQSISDAEQRGENALKDAKNKLNDLEDALQQAKEDLARLLRDYQELMNTKLALDLEIATYRTLLEGEESRMSGECAPNVSVSVSTSHTTISGGGSRGGGGGGYGSGGSSYGSGGGSYGSGGGGGGGRGSYGSGGSSYGSGGGSYGSGGGGGGHGSYGSGSSSGGYRGGSGGGGGGSSGGRGSGGGSSGGSIGGRGSSSGGVKSSGGSSSVKFVSTTYSGVTR

SEQ ID NO: 99 - protein, 639 aa, Homo sapiens
MSCQISCKSRGRGGGGGGFRGFSSGSAVVSGGSRRSTSSFSCLSRHGGGGGGFGGGGFGSRSLVGLGGTKSISISVAGGGGGFGAAGGFGGRGGGFGGGSSFGGGSGFSGGGFGGGGFGGGRFGGFGGPGGVGGLGGPGGFGPGGYPGGIHEVSVNQSLLQPLNVKVDPEIQNVKAQEREQIKTLNNKFASFIDKVRFLEQQNQVLQTKWELLQQMNVGTRPINLEPIFQGYIDSLKRYLDGLTAERTSQNSELNNMQDLVEDYKKKYEDEINKRTAAENDFVTLKKDVDNAYMIKVELQSKVDLLNQEIEFLKVLYDAEISQIHQSVTDTNVILSMDNSRNLDLDSIIAEVKAQYEEIAQRSKEEAEALYHSKYEELQVTVGRHGDSLKEIKIEISELNRVIQRLQGEIAHVKKQCKNVQDAIADAEQRGEHALKDARNKLNDLEEALQQAKEDLARLLRDYQELMNVKLALDVEIATYRKLLEGEECRMSGDLSSNVTVSVTSSTISSNVASKAAFGGSGGRGSSSGGGYSSGSSSYGSGGRQSGSRGGSGGGGSISGGGYGSGGGSGGRYGSGGGSKGGSISGGGYGSGGGKHSSGGGSRGGSSSGGGYGSGGGGSSSVKGSSGEAFGSSVTFSFR

SEQ ID NO: 100 - protein, 590 aa, Homo sapiens
MSRQSSVSFRSGGSRSFSTASAITPSVSRTSFTSVSRSGGGGGGGFGRVSLAGACGVGGYGSRSLYNLGGSKRISISTSGGSFRNRFGAGAGGGYGFGGGAGSGFGFGGGAGGGFGLGGGAGFGGGFGGPGFPVCPPGGIQEVTVNQSLLTPLNLQIDPSIQRVRTEEREQIKTLNNKFASFIDKVRFLEQQNKVLDTKWTLLQEQGTKTVRQNLEPLFEQYINNLRRQLDSIVGERGRLDSELRNMQDLVEDFKNKYEDEINKRTTAENEFVMLKKDVDAAYMNKVELEAKVDALMDEINFMKMFFDAELSQMQTHVSDTSVVLSMDNNRNLDLDSIIAEVKAQYEEIANRSRTEAESWYQTKYEELQQTAGRHGDDLRNTKHEISEMNRMIQRLRAEIDNVKKQCANLQNAIADAEQRGELALKDARNKLAELEEALQKAKQDMARLLREYQELMNTKLALDVEIATYRKLLEGEECRLSGEGVGPVNISVVTSSVSSGYGSGSGYGGGLGGGLGGGLGGGLAGGSSGSYYSSSSGGVGLGGGLSVGGSGFSASSGRGLGVGFGSGGGSSSSVKFVSTTSSSRKSFKS

SEQ ID NO: 101 - protein, 564 aa, Homo sapiens
MASTSTTIRSHSSSRRGFSANSARLPGVSRSGFSSVSVSRSRGSGGLGGACGGAGFGSRSLYGLGGSKRISIGGGSCAISGGYGSRAGGSYGFGGAGSGFGFGGGAGIGFGLGGGAGLAGGFGGPGFPVCPPGGIQEVTVNQSLLTPLNLQIDPTIQRVRAEEREQIKTLNNKFASFIDKVRFLEQQNKVLETKWTLLQEQGTKTVRQNLEPLFEQYINNLRRQLDSIVGERGRLDSELRGMQDLVEDFKNKYEDEINKRTAAENEFVTLKKDVDAAYMNKVELQAKADTLTDEINFLRALYDAELSQMQTHISDTSVVLSMDNNRNLDLDSIIAEVKAQYEEIAQRSRAEAESWYQTKYEELQVTAGRHGDDLRNTKQEIAEINRMIQRLRSEIDHVKKQCANLQAAIADAEQRGEMALKDAKNKLEGLEDALQKAKQDLARLLKEYQELMNVKLALDVEIATYRKLLEGEECRLNGEGVGQVNISVVQSTVSSGYGGASGVGSGLGLGGGSSYSYGSGLGVGGGFSSSSGRAIGGGLSSVGGGSSTIKYTTTSSSSRKSYKH

SEQ ID NO: 102 - protein, 483 aa, Homo sapiens
MSIRVTQKSYKVSTSGPRAFSSRSYTSGPGSRISSSSFSRVGSSNFRGGLGGGYGGASGMGGITAVTVNQSLLSPLVLEVDPNIQAVRTQEKEQIKTLNNKFASFIDKVRFLEQQNKMLETKWSLLQQQKTARSNMDNMFESYINNLRRQLETLGQEKLKLEAELGNMQGLVEDFKNKYEDEINKRTEMENEFVLIKKDVDEAYMNKVELESRLEGLTDEINFLRQLYEEEIRELQSQISDTSVVLSMDNSRSLDMDSIIAEVKAQYEDIANRSRAEAESMYQIKYEELQSLAGKHGDDLRRTKTEISEMNRNISRLQAEIEGLKGQRASLEAAIADAEQRGELAIKDANAKLSELEAALQRAKQDMARQLREYQELMNVKLALDIEIATYRKLLEGEESRLESGMQNMSIHTKTTSGYAGGLSSAYGGLTSPGLSYSLGSSFGSGAGSSSFSRTSSSRAVVVKKIETRDGKLVSESSDVLPK

SEQ ID NO: 103 - protein, 1648 aa, Homo sapiens
MSLHSTHNRNNSGDILDIPSSQNSSSLNALTHSSRLKLHLKSDMSECENDDPLLRSAGKVRDINRTYVISASRKTADMPLTPNPVGRLALQRRTTRNKESSLLVSELEDTTEKTAETRLTLQRRAKTDSAEKWKTAEIDSVKMTLNVGGETENNGVSKESRTNVRIVNNAKNSFVASSVPLDEDPQVIEMMADKKYKETFSAPSRANENVALKYSSNRPPIASLSQTEVVRSGHLTTKPTQSKLDIKVLGTGNLYHRSIGKEIAKTSNKFGSLEKRTPTKCTTEHKLTTKCSLPQLKSPAPSILKNRMSNLQVKQRPKSSFLANKQERSAENTILPEEETVVQNTSAGKDPLKVENSQVTVAVRVRPFTKREKIEKASQVVFMSGKEITVEHPDTKQVYNFIYDVSFWSFDECHPHYASQTTVYEKLAAPLLERAFEGFNTCLFAYGQTGSGKSYTMMGFSEEPGIIPRFCEDLFSQVARKQTQEVSYHIEMSFFEVYNEKIHDLLVCKDENGQRKQPLRVREHPVYGPYVEALSMNIVSSYADIQSWLELGNKQRATAATGMNDKSSRSHSVFTLVMTQTKTEFVEGEEHDHRITSRINLIDLAGSERCSTAHTNGDRLKEGVSINKSLLTLGKVISALSEQANQRSVFIPYRESVLTWLLKESLGGNSKTAMIATISPAASNIEETLSTLRYANQARLIVNIAKVNEDMNAKLIRELKAEIAKLKAAQRNSRNIDPERYRLCRQEITSLRMKLHQQERDMAEMQRVWKEKFEQAEKRKLQETKELQKAGIMFQMDNHLPNLVNLNEDPQLSEMLLYMIKEGTTTVGKYKPNSSHDIQLSGVLIADDHCTIKNFGGTVSIIPVGEAKTYVNGKHILEITVLRHGDRVILGGDHYFRFNHPVEVQKGKRPSGRDTPISEGPKDFEFAKNELLMAQRSQLEAEIKEAQLKAKEEMMQGIQIAKEMAQQELSSQKAAYESKIKALEAELREESQRKKMQEINNQKANHKIEELEKAKQHLEQEIYVNKKRLEMETLATKQALEDHSIRHARILEALETEKQKIAKEVQILQQNRNNRDKTFTVQTTWSSMKLSMMIQEANAISSKLKTYYVFGRHDISDKSSSDTSIRVRNLKLGISTFWSLEKFESKLAAMKELYESNGSNRGEDAFCDPEDEWEPDITDAPVSSLSRRRSRSLMKNRRISGCLHDIQVHPIKNLHSSHSSGLMDKSSTIYSNSAESFLPGICKELIGSSLDFFGQSYDEERTIADSLINSFLKIYNGLFAISKAHEEQDEESQDNLFSSDRAIQSLTIQTACAFEQLVVLMKHWLSDLLPCTNIARLEDELRQEVKKLGGYLQLFLQGCCLDISSMIKEAQKNAIQIVQQAVKYVGQLAVLKGSKLHFLENGNNKAASVQEEFMDAVCDGVGLGMKILLDSGLEKAKELQHELFRQCTKNEVTKEMKTNAMGLIRSLENIFAESKIKSFRRQVQEENFEYQDFKRMVNRAPEFLKLKHCLEKAIEIIISALKGCHSDINLLQTCVESIRNLASDFYSDFSVPSTSVGSYESRVTHIVHQELESLAKSLLFCFESEESPDLLKPWETYNQNTKEEHQQSKSSGIDGSKNKGVPKRVYELHGSSPAVSSEECTPSRIQWV

SEQ ID NO: 104 - protein, 2038 aa, Homo sapiens
MSQRPPSMYWCVGPEESAVCPERAMETLNGAGDTGGKPSTRGGDPAARSRRTEGIRAAYRRGDRGGARDLLEEACDQCASQLEKGQLLSIPAAYGDLEMVRYLLSKRLVELPTEPTDDNPAVVAAYFGHTAVVQNTLPTEPTDDNPAVVAAYFGHTAVVQELLESLPGPCSPQRLLNWMLALACQRGHLGVVKLLVLTHGADPESYAVRKNEFPVIVRLPLYAAIKSGNEDIAIFLLRHGAYFCSYILLDSPDPSKHLLRKYFIEASPLPSSYPGKTALRVKWSHLRLPWVDLDWLIDISCQITELDLSANCLATLPSVIPWGLINLRKLNLSDNHLGELPGVQSSDEIICSRLLEIDISSNKLSHLPPGFLHLSKLQKLTASKNCLEKLFEEENATNWIGLRKLQELDISDNKLTELPALFLHSFKSLNSLNVSRNNLKVFPDPWACPLKCCKASRNALECLPDKMAVFWKNHLKDVDFSENALKEVPLGLFQLDALMFLRLQGNQLAALPPQEKWTCRQLKTLDLSRNQLGKNEDGLKTKRIAFFTTRGRQRSGTEAASVLEFPAFLSESLEVLCLNDNHLDTVPPSVCLLKSLSELYLGNNPGLRELPPELGQLGNLWQLDTEDLTISNVPAEIQKEGPKAMLSYLRAQLRKAEKCKLMKMIIVGPPRQGKSTLLEILQTGRAPQVVHGEATIRTTKWELQRPAGSRAKVESVEFNVWDIGGPASMATVNQCFFTDKALYVVVWNLALGEEAVANLQFWLLNIEAKAPNAVVLVVGTHLDLIEAKFRVERIATLRAYVLALCRSPSGSRATGFPDITFKHLHEISCKSLEGQEGLRQLIFHVTCSMKDVGSTIGCQRLAGRLIPRSYLSLQEAVLAEQQRRSRDDDVQYLTDRQLEQLVEQTPDNDIKDYEDLQSAISFLIETGTLLHFPDTSHGLRNLYFLDPIWLSECLQRIFNIKGSRSVAKNGVIRAEDLRMLLVGTGFTQQTEEQYFQFLAKFEIALPVANDSYLLPHLLPSKPGLDTHGMRHPTANTIQRVFKMSFVPVGFWQRFIARMLISLAEMDLQLFENKKNTKSRNRKVTIYSFTGNQRNRCSTFRVKRNQTIYWQEGLLVTFDGGYLSVESSDVNWKKKKSGGMKIVCQSEVRDFSAMAFITDHVNSLIDQWFPALTATESDGTPLMEQYVPCPVCETAWAQHTDPSEKSEDVQYFDMEDCVLTAIERDFISCPRHPDLPVPLQELVPELFMTDFPARLFLENSKLEHSEDEGSVLGQGGSGTVIYRARYQGQPVAVKRFHIKKFKNFANVPADTMLRHLRATDAMKNFSEFRQEASMLHALQHPCIVALIGISIHPLCFALELAPLSSLNTVLSENARDSSFIPLGHMLTQKIAYQIASGLAYLHKKNIIFCDLKSDNILVWSLDVKEHINIKLSDYGISRQSFHEGALGVEGTPGYQAPEIRPRIVYDEKVDMFSYGMVLYELLSGQRPALGHHQLQIAKKLSKGIRPVLGQPEEVQFRRLQALMMECWDTKPEKRPLALSVVSQMKDPTFATFMYELCCGKQTAFFSSQGQEYTVVFWDGKEESRNYTVVNTEKGLMEVQRMCCPGMKVSCQLQVQRSLWTATEDQKIYIYTLKGMCPLNTPQQALDTPAVVTCFLAVPVIKKNSYLVLAGLADGLVAVFPVVRGTPKDSCSYLCSHTANRSKFSIADEDARQNPYPVKAMEVVNSGSEVWYSNGPGLLVIDCASLEICRRLEPYMAPSMVTSVVCSSEGRGEEVVWCLDDKANSLVMYHSTTYQLCARYFCGVPSPLRDMFPVRPLDTEPPAASHTANPKVPEGDSIADVSIMYSEELGTQILIHQESLTDYCSMSSYSSSPPRQAARSPSSLPSSPASSSSVPFSTDCEDSDMLHTPGAASDRSEHDLTPMDGETFSQHLQAVKILAVRDLIWVPRRGGDVIVIGLEKDSGAQRGRVIAVLKARELTPHGVLVDAAVVAKDTVVCTFENENTEWCLAVWRGWGAREFDIFYQSYEELGRLEACTRKRR

SEQ ID NO: 105 - protein, 176 aa, Homo sapiens
MKPLLLAVSLGLIAALQAHHLLASDEEIQDVSGTWYLKAMTVDREFPEMNLESVTPMTLTTLEGGNLEAKVTMLISGRCQEVKAVLEKTDEPGKYTADGGKHVAYIIRSHVKDHYIFYCEGELHGKPVRGVKLVGRDPKNNLEALEDFEKAAGARGLSTESILIPRQSETCSPGSD

SEQ ID NO: 106 - protein, 90 aa, Homo sapiens
MKLSVCLLLVTLALCCYQANAEFCPALVSELLDFFFISEPLFKLSLAKFDAPPEAVAAKLGVKRCTDQMSLQKRSLIAEVLVKILKKCSV

SEQ ID NO: 107 - protein, 332 aa, Homo sapiens
MATLKDQLIYNLLKEEQTPQNKITVVGVGAVGMACAISILMKDLADELALVDVIEDKLKGEMMDLQHGSLFLRTPKIVSGKDYNVTANSKLVIITAGARQQEGESRLNLVQRNVNIFKFIIPNVVKYSPNCKLLIVSNPVDILTYVAWKISGFPKNRVIGSGCNLDSARFRYLMGERLGVHPLSCHGWVLGEHGDSSVPVWSGMNVAGVSLKTLHPDLGTDKDKEQWKEVHKQVVESAYEVIKLKGYTSWAIGLSVADLAESIMKNLRRVHPVSTMIKGLYGIKDDVFLSVPCILGQNGISDLVKVTLTSEEEARLKKSADTLWGIQKELQF

SEQ ID NO: 108 - protein, 1857 aa, Homo sapiens
MARKKLKKFTTLEIVLSVLLLVLFIISIVLIVLLAKESLKSTAPDPGTTGTPDPGTTGTPDPGTTGTTHARTTGPPDPGTTGTTPVSAECPVVNELERINCIPDQPPTKATCDQRGCCWNPQGAVSVPWCYYSKNHSYHVEGNLVNTNAGFTARLKNLPSSPVFGSNVDNVLLTAEYQTSNRFHFKLTDQTNNRFEVPHEHVQSFSGNAAASLTYQVEISRQPFSIKVTRRSNNRVLFDSSIGPLLFADQFLQLSTRLPSTNVYGLGEHVHQQYRHDMNWKTWPIFNRDTTPNGNGTNLYGAQTFFLCLEDASGLSFGVFLMNSNAMEVVLQPAPAITYRTIGGILDFYVFLGNTPEQVVQEYLELIGRPALPSYWALGFHLSRYEYGTLDNMREVVERNRAAQLPYDVQHADIDYMDERRDFTYDSVDFKGFPEFVNELHNNGQKLVIIVDPAISNNSSSSKPYGPYDRGSDMKIWVNSSDGVTPLIGEVWPGQTVFPDYTNPNCAVWWTKEFELFHNQVEFDGIWIDMNEVSNFVDGSVSGCSTNNLNNPPFTPRILDGYLFCKTLCMDAVQHWGKQYDIHNLYGYSMAVATAEAAKTVFPNKRSFILTRSTFAGSGKFAAHWLGDNTATWDDLRWSIPGVLEFNLFGIPMVGPDICGFALDTPEELCRRWMQLGAFYPFSRNHNGQGYKDQDPASFGADSLLLNSSRHYLNIRYTLLPYLYTLFFRAHSRGDTVARPLLHEFYEDNSTWDVHQQFLWGPGLLITPVLDEGAEKVMAYVPDAVWYDYETGSQVRWRKQKVEMELPGDKIGLHLRGGYIFPTQQPNTTTLASRKNPLGLIIALDENKEAKGELFWDNGETKDTVANKVYLLCEFSVTQNRLEVNISQSTYKDPNNLAFNEIKILGTEEPSNVTVKHNGVPSQTSPTVTYDSNLKVAIITDIDLLLGEAYTVEWSIKIRDEEKIDCYPDENGASAENCTARGCIWEASNSSGVPFCYFVNDLYSVSDVQYNSHGATADISLKSSVYANAFPSTPVNPLRLDVTYHKNEMLQFKIYDPNKNRYEVPVPLNIPSMPSSTPEGQLYDVLIKKNPFGIEIRRKSTGTIIWDSQLLGFTFSDMFIRISTRLPSKYLYGFGETEHRSYRRDLEWHTWGMFSRDQPPGYKKNSYGVHPYYMGLEEDGSAHGVLLLNSNAMDVTFQPLPALTYRTTGGVLDFYVFLGPTPELVTQQYTELIGRPVMVPYWSLGFQLCRYGYQNDSEIASLYDEMVAAQIPYDVQYSDIDYMERQLDFTLSPKFAGFPALINRMKADGMRVILILDPAISGNETQPYPAFTRGVEDDVFIKYPNDGDIVWGKVWPDFPDVVVNGSLDWDSQVELYRAYVAFPDFFRNSTAKWWKREIEELYNNPQNPERSLKFDGMWIDMNEPSSFVNGAVSPGCRDASLNHPPYMPHLESRDRGLSSKTLCMESQQILPDGSLVQHYNVHNLYGWSQTRPTYEAVQEVTGQRGVVITRSTFPSSGRWAGHWLGDNTAAWDQLKKSIIGMMEFSLFGISYTGADICGFFQDAEYEMCVRWMQLGAFYPFSRNHNTIGTRRQDPVSWDVAFVNISRTVLQTRYTLLPYLYTLMHKAHTEGVTVVRPLLHEFVSDQVTWDIDSQFLLGPAFLVSPVLERNARNVTAYFPRARWYDYYTGVDINARGEWKTLPAPLDHINLHVRGGYILPWQEPALNTHLSRQKFMGFKIALDDEGTAGGWLFWDDGQSIDTYGKGLYYLASFSASQNTMQSHIIFNNYITGTNPLKLGYIEIWGVGSVPVTSVSISVSGMVITPSFNNDPTTQVLSIDVTDRNISLHNFTSLTWISTL

SEQ ID NO: 109 - protein, 779 aa, Homo sapiens
MGKSEGPVGMVESAGRAGQKRPGFLEGGLLLLLLLVTAALVALGVLYADRRGKQLPRLASRLCFLQEERTFVKRKPRGIPEAQEVSEVCTTPGCVIAAARILQNMDPTTEPCDDFYQFACGGWLRRHVIPETNSRYSIFDVLRDELEVILKAVLENSTAKDRPAVEKARTLYRSCMNQSVIEKRGSQPLLDILEVVGGWPVAMDRWNETVGLEWELERQLALMNSQFNRRVLIDLFIWNDDQNSSRHIIYIDQPTLGMPSREYYFNGGSNRKVREAYLQFMVSVATLLREDANLPRDSCLVQEDMVQVLELETQLAKATVPQEERHDVIALYHRMGLEELQSQFGLKGFNWTLFIQTVLSSVKIKLLPDEEVVVYGIPYLQNLENIIDTYSARTIQNYLVWRLVLDRIGSLSQRFKDTRVNYRKALFGTMVEEVRWRECVGYVNSNMENAVGSLYVREAFPGDSKSMVRELIDKVRTVFVETLDELGWMDEESKKKAQEKAMSIREQIGHPDYILEEMNRRLDEEYSNLNFSEDLYFENSLQNLKVGAQRSLRKLREKVDPNLWIIGAAVVNAFYSPNRNQIVFPAGILQPPFFSKEQPQALNFGGIGMVIGHEITHGFDDNGRNFDKNGNMMDWWSNFSTQHFREQSECMIYQYGNYSWDLADEQNVNGFNTLGENIADNGGVRQAYKAYLKWMAEGGKDQQLPGLDLTHEQLFFINYAQVWCGSYRPEFAIQSIKTDVHSPLKYRVLGSLQNLAAFADTFHCARGTPMHPKERCRVW

SEQ ID NO: 110 - protein, 1152 aa, Homo sapiens
MADLSLADALTEPSPDIEGEIKRDFIATLEAEAFDDVVGETVGKTDYIPLLDVDEKTGNSESKKKPCSETSQIEDTPSSKPTLLANGGHGVEGSDTTGSPTEFLEEKMAYQEYPNSQNWPEDTNFCFQPEQVVDPIQTDPFKMYHDDDLADLVFPSSATADTSIFAGQNDPLKDSYGMSPCNTAVVPQGWSVEALNSPHSESFVSPEAVAEPPQPTAVPLELAKEIEMASEERPPAQALEIMMGLKTTDMAPSKETEMALAKDMALATKTEVALAKDMESPTKLDVTLAKDMQPSMESDMALVKDMELPTEKEVALVKDVRWPTETDVSSAKNVVLPTETEVAPAKDVTLLKETERASPIKMDLAPSKDMGPPKENKKETERASPIKMDLAPSKDMGPPKENKIVPAKDLVLLSEIEVAQANDIISSTEISSAEKVALSSETEVALARDMTLPPETNVILTKDKALPLEAEVAPVKDMAQLPETEIAPAKDVAPSTVKEVGLLKDMSPLSETEMALGKDVTPPPETEVVLIKNVCLPPEMEVALTEDQVPALKTEAPLAKDGVLTLANNVTPAKDVPPLSETEATPVPIKDMEIAQTQKGISEDSHLESLQDVGQSAAPTFMISPETVTGTGKKCSLPAEEDSVLEKLGERKPCNSQPSELSSETSGIARPEEGRPVVSGTGNDITTPPNKELPPSPEKKTKPLATTQPAKTSTSKAKTQPTSLPKQPAPTTIGGLNKKPMSLASGLVPAAPPKRPAVASARPSILPSKDVKPKPIADAKAPEKRASPSKPASAPASRSGSKSTQTVAKTTTAAAVASTGPSSRSPSTLLPKKPTAIKTEGKPAEVKKMTAKSVPADLSRPKSTSTSSMKKTTTLSGTAPAAGVVPSRVKATPMPSRPSTTPFIDKKPTSAKPSSTTPRLSRLATNTSAPDLKNVRSKVGSTENIKHQPGGGRAKVEKKTEAAATTRKPESNAVTKTAGPIASAQKQPAGKVQIVSKKVSYSHIQSKCGSKDNIKHVPGGGNVQIQNKKVDISKVSSKCGSKANIKHKPGGGDVKIESQKLNFKEKAQAKVGSLDNVGHLPAGGAVKTEGGGSEAPLCPGPPAGEEPAISEAAPEAGAPTSASGLNGHPTLSGGGDQREAQTLDSQIQETSI

SEQ ID NO: 111 - protein, 1512 aa, Homo sapiens
MAAAAGNRASSSGFPGARATSPEAGGGGGALKASSAPAAAAGLLREAGSGGRERADWRRRQLRKVRSVELDQLPEQPLFLAASPPASSTSPSPEPADAAGSGTGFQPVAVPPPHGAASRGGAHLTESVAAPDSGASSPAAAEPGEKRAPAAEPSPAAAPAGREMENKETLKGLHKMDDRPEERMIREKLKATCMPAWKHEWLERRNRRGPVVVKPIPVKGDGSEMNHLAAESPGEVQASAASPASKGRRSPSPGNSPSGRTVKSESPGVRRKRVSPVPFQSGRITPPRRAPSPDGFSPYSPEETNRRVNKVMRARLYLLQQIGPNSFLIGGDSPDNKYRVFIGPQNCSCARGTFCIHLLFVMLRVFQLEPSDPMLWRKTLKNFEVESLFQKYHSRRSSRIKAPSRNTIQKFVSRMSNSHTLSSSSTSTSSSENSIKDEEEQMCPICLLGMLDEESLTVCEDGCRNKLHHHCMSIWAEECRRNREPLICPLCRSKWRSHDFYSHELSSPVDSPSSLRAAQQQTVQQQPLAGSRRNQESNFNLTHYGTQQIPPAYKDLAEPWIQVFGMELVGCLFSRNWNVREMALRRLSHDVSGALLLANGESTGNSGGSSGSSPSGGATSGSSQTSISGDVVEACCSVLSMVCADPVYKVYVAALKTLRAMLVYTPCHSLAERIKLQRLLQPVVDTILVKCADANSRTSQLSISTLLELCKGQAGELAVGREILKAGSIGIGGVDYVLNCILGNQTESNNWQELLGRLCLIDRLLLEFPAEFYPHIVSTDVSQAEPVEIRYKKLLSLLTFALQSIDNSHSMVGKLSRRIYLSSARMVTTVPHVFSKLLEMLSVSSSTHFTRMRRRLMAIADEVEIAEAIQLGVEDTLDGQQDSFLQASVPNNYLETTENSSPECTVHLEKTGKGLCATKLSASSEDISERLASISVGPSSSTTTTTTTTEQPKPMVQTKGRPHSQCLNSSPLSHHSQLMFPALSTPSSSTPSVPAGTATDVSKHRLQGFIPCRIPSASPQTQRKFSLQFHRNCPENKDSDKLSPVFTQSRPLPSSNIHRPKPSRPTPGNTSKQGDPSKNSMTLDLNSSSKCDDSFGCSSNSSNAVIPSDETVFTPVEEKCRLDVNTELNSSIEDLLEASMPSSDTTVTFKSEVAVLSPEKAENDDTYKDDVNHNQKCKEKMEAEEEEALAIAMAMSASQDALPIVPQLQVENGEDIIIIQQDTPETLPGHTKAKQPYREDTEWLKGQQIGLGAFSSCYQAQDVGTGTLMAVKQVTYVRNTSSEQEEVVEALREEIRMMSHLNHPNIIRMLGATCEKSNYNLFIEWMAGGSVAHLLSKYGAFKESVVINYTEQLLRGLSYLHENQIIHRDVKGANLLIDSTGQRLRIADFGAAARLASKGTGAGEFQGQLLGTIAFMAPEVLRGQQYGRSCDVWSVGCAIIEMACAKPPWNAEKHSNHLALIFKIASATTAPSIPSHLSPGLRDVALRCLELQPQDRPPSRELLKHPVFRTTW

SEQ ID NO: 112 - protein, 954 aa, Homo sapiens
MEEEEGAVAKEWGTTPAGPVWTAVFDYEAAGDEELTLRRGDRVQVLSQDCAVSGDEGWWTGQLPSGRVGVFPSNYVAPGAPAAPAGLQLPQEIPFHELQLEEIIGVGGFGKVYRALWRGEEVAVKAARLDPEKDPAVTAEQVCQEARLFGALQHPNIIALRGACLNPPHLCLVMEYARGGALSRVLAGRRVPPHVLVNWAVQVARGMNYLHNDAPVPIIHRDLKSINILILEAIENHNLADTVLKITDFGLAREWHKTTKMSAAGTYAWMAPEVIRLSLFSKSSDVWSFGVLLWELLTGEVPYREIDALAVAYGVAMNKLTLPIPSTCPEPFARLLEECWDPDPHGRPDFGSILKRLEVIEQSALFQMPLESFHSLQEDWKLEIQHMFDDLRTKEKELRSREEELLRAAQEQRFQEEQLRRREQELAEREMDIVERELHLLMCQLSQEKPRVRKRKGNFKRSRLLKLREGGSHISLPSGFEHKITVQASPTLDKRKGSDGASPPASPSIIPRLRAIRLTPVDCGGSSSGSSSGGSGTWSRGGPPKKEELVGGKKKGRTWGPSSTLQKERVGGEERLKGLGEGSKQWSSSAPNLGKSPKHTPIAPGFASLNEMEEFAEAEDGGSSVPPSPYSTPSYLSVPLPAEPSPGARAPWEPTPSAPPARWGHGARRRCDLALLGCATLLGAVGLGADVAEARAADGEEQRRWLDGLFFPRAGRFPRGLSPPARPHGRREDVGPGLGLAPSATLVSLSSVSDCNSTRSLLRSDSDEAAPAAPSPPPSPPAPTPTPSPSTNPLVDLELESFKKDPRQSLTPTHVTAACAVSRGHRRTPSDGALGQRGPPEPAGHGPGPRDLLDFPRLPDPQALFPARRRPPEFPGRPTTLTFAPRPRPAASRPRLDPWKLVSFGRTLTISPPSRPDTPESPGPPSVQPTLLDMDMEGQNQDSTVPLCGAHGSH

SEQ ID NO: 113 - protein, 1503 aa, Homo sapiens
MAAPAEPCAGQGVWNQTEPEPAATSLLSLCFLRTAGVWVPPMYLWVLGPIYLLFIHHHGRGYLRMSPLFKAKMVLGFALIVLCTSSVAVALWKIQQGTPEAPEFLIHPTVWLTTMSFAVFLIHTERKKGVQSSGVLFGYWLLCFVLPATNAAQQASGAGFQSDPVRHLSTYLCLSLVVAQFVLSCLADQPPFFPEDPQQSNPCPETGAAFPSKATFWWVSGLVWRGYRRPLRPKDLWSLGRENSSEELVSRLEKEWMRNRSAARRHNKAIAFKRKGGSGMKAPETEPFLRQEGSQWRPLLKAIWQVFHSTFLLGTLSLIISDVFRFTVPKLLSLFLEFIGDPKPPAWKGYLLAVLMFLSACLQTLFEQQNMYRLKVLQMRLRSAITGLVYRKVLALSSGSRKASAVGDVVNLVSVDVQRLTESVLYLNGLWLPLVWIVVCFVYLWQLLGPSALTAIAVFLSLLPLNFFISKKRNHHQEEQMRQKDSRARLTSSILRNSKTIKFHGWEGAFLDRVLGIRGQELGALRTSGLLFSVSLVSFQVSTFLVALVVFAVHTLVAENAMNAEKAFVTLTVLNILNKAQAFLPFSIHSLVQARVSFDRLVTFLCLEEVDPGVVDSSSSGSAAGKDCITIHSATFAWSQESPPCLHRINLTVPQGCLLAVVGPVGAGKSSLLSALLGELSKVEGFVSIEGAVAYVPQEAWVQNTSVVENVCFGQELDPPWLERVLEACALQPDVDSFPEGIHTSIGEQGMNLSGGQKQRLSLARAVYRKAAVYLLDDPLAALDAHVGQHVFNQVIGPGGLLQGTTRILVTHALHILPQADWIIVLANGAIAEMGSYQELLQRKGALMCLLDQARQPGDRGEGETEPGTSTKDPRGTSAGRRPELRRERSIKSVPEKDRTTSEAQTEVPLDDPDRAGWPAGKDSIQYGRVKATVHLAYLRAVGTPLCLYALFLFLCQQVASFCRGYWLSLWADDPAVGGQQTQAALRGGIFGLLGCLQAIGLFASMAAVLLGGARASRLLFQRLLWDVVRSPISFFERTPIGHLLNRFSKETDTVDVDIPDKLRSLLMYAFGLLEVSLVVAVATPLATVAILPLFLLYAGFQSLYVVSSCQLRRLESASYSSVCSHMAETFQGSTVVRAFRTQAPFVAQNNARVDESQRISFPRLVADRWLAANVELLGNGLVFAAATCAVLSKAHLSAGLVGFSVSAALQVTQTLQWVVRNWTDLENSIVSVERMQDYAWTPKEAPWRLPTCAAQPPWPQGGQIEFRDFGLRYRPELPLAVQGVSFKIHAGEKVGIVGRTGAGKSSLASGLLRLQEAAEGGIWIDGVPIAHVGLHTLRSRISIIPQDPILFPGSLRMNLDLLQEHSDEAIWAALETVQLKALVASLPGQLQYKCADRGEDLSVGQKQLLCLARALLRKTQILILDEATAAVDPGTELQMQAMLGSWFAQCTVLLIAHRLRSVMDCARVLVMDKGQVAESGSPAQLLAQKGLFYRLAQESGLV

SEQ ID NO: 114 - protein, 1976 aa, Homo sapiens
MAQRTGLEDPERYLFVDRAVIYNPATQADWTAKKLVWIPSERHGFEAASIKEERGDEVMVELAENGKKAMVNKDDIQKMNPPKFSKVEDMAELTCLNEASVLHNLKDRYYSGLIYTYSGLFCVVINPYKNLPIYSENIIEMYRGKKRHEMPPHIYAISESAYRCMLQDREDQSILCTGESGAGKTENTKKVIQYLAHVASSHKGRKDHNIPGELERQLLQANPILESFGNAKTVKNDNSSRFGKFIRINFDVTGYIVGANIETYLLEKSRAVRQAKDERTFHIFYQLLSGAGEHLKSDLLLEGFNNYRFLSNGYIPIPGQQDKDNFQETMEAMHIMGFSHEEILSMLKVVSSVLQFGNISFKKERNTDQASMPENTVAQKLCHLLGMNVMEFTRAILTPRIKVGRDYVQKAQTKEQADFAVEALAKATYERLFRWLVHRINKALDRTKRQGASFIGILDIAGFEIFELNSFEQLCINYTNEKLQQLFNHTMFILEQEEYQREGIEWNFIDFGLDLQPCIDLIERPANPPGVLALLDEECWFPKATDKTFVEKLVQEQGSHSKFQKPRQLKDKADFCIIHYAGKVDYKADEWLMKNMDPLNDNVATLLHQSSDRFVAELWKDVDRIVGLDQVTGMTETAFGSAYKTKKGMFRTVGQLYKESLTKLMATLRNTNPNFVRCIIPNHEKRAGKLDPHLVLDQLRCNGVLEGIRICRQGFPNRIVFQEFRQRYEILTPNAIPKGFMDGKQACERMIRALELDPNLYRIGQSKIFFRAGVLAHLEEERDLKITDIIIFFQAVCRGYLARKAFAKKQQQLSALKVLQRNCAAYLKLRHWQWWRVFTKVKPLLQVTRQEEELQAKDEELLKVKEKQTKVEGELEEMERKHQQLLEEKNILAEQLQAETELFAEAEEMRARLAAKKQELEEILHDLESRVEEEEERNQILQNEKKKMQAHIQDLEEQLDEEEGARQKLQLEKVTAEAKIKKMEEEILLLEDQNSKFIKEKKLMEDRIAECSSQLAEEEEKAKNLAKIRNKQEVMISDLEERLKKEEKTRQELEKAKRKLDGETTDLQDQIAELQAQIDELKLQLAKKEEELQGALARGDDETLHKNNALKVVRELQAQIAELQEDFESEKASRNKAEKQKRDLSEELEALKTELEDTLDTTAAQQELRTKREQEVAELKKALEEETKNHEAQIQDMRQRHATALEELSEQLEQAKRFKANLEKNKQGLETDNKELACEVKVLQQVKAESEHKRKKLDAQVQELHAKVSEGDRLRVELAEKASKLQNELDNVSTLLEEAEKKGIKFAKDAASLESQLQDTQELLQEETRQKLNLSSRIRQLEEEKNSLQEQQEEEEEARKNLEKQVLALQSQLADTKKKVDDDLGTIESLEEAKKKLLKDAEALSQRLEEKALAYDKLEKTKNRLQQELDDLTVDLDHQRQVASNLEKKQKKFDQLLAEEKSISARYAEERDRAEAEAREKETKALSLARALEEALEAKEEFERQNKQLRADMEDLMSSKDDVGKNVHELEKSKRALEQQVEEMRTQLEELEDELQATEDAKLRLEVNMQAMKAQFERDLQTRDEQNEEKKRLLIKQVRELEAELEDERKQRALAVASKKKMEIDLKDLEAQIEAANKARDEVIKQLRKLQAQMKDYQRELEEARASRDEIFAQSKESEKKLKSLEAEILQLQEELASSERARRHAEQERDELADEITNSASGKSALLDEKRRLEARIAQLEEELEEEQSNMELLNDRFRKTTLQVDTLNAELAAERSAAQKSDNARQQLERQNKELKAKLQELEGAVKSKFKATISALEAKIGQLEEQLEQEAKERAAANKLVRRTEKKLKEIFMQVEDERRHADQYKEQMEKANARMKQLKRQLEEAEEEATRANASRRKLQRELDDATEANEGLSREVSTLKNRLRRGGPISFSSSRSGRRQLHLEGASLELSDDDTESKTSDVNETQPPQSE

SEQ ID NO: 115 - protein, 1960 aa, Homo sapiens
MAQQAADKYLYVDKNFINNPLAQADWAAKKLVWVPSDKSGFEPASLKEEVGEEAIVELVENGKKVKVNKDDIQKMNPPKFSKVEDMAELTCLNEASVLHNLKERYYSGLIYTYSGLFCVVINPYKNLPIYSEEIVEMYKGKKRHEMPPHIYAITDTAYRSMMQDREDQSILCTGESGAGKTENTKKVIQYLAYVASSHKSKKDQGELERQLLQANPILEAFGNAKTVKNDNSSRFGKFIRINFDVNGYIVGANIETYLLEKSRAIRQAKEERTFHIFYYLLSGAGEHLKTDLLLEPYNKYRFLSNGHVTIPGQQDKDMFQETMEAMRIMGIPEEEQMGLLRVISGVLQLGNIVFKKERNTDQASMPDNTAAQKVSHLLGINVTDFTRGILTPRIKVGRDYVQKAQTKEQADFAIEALAKATYERMFRWLVLRINKALDKTKRQGASFIGILDIAGFEIFDLNSFEQLCINYTNEKLQQLFNHTMFILEQEEYQREGIEWNFIDFGLDLQPCIDLIEKPAGPPGILALLDEECWFPKATDKSFVEKVMQEQGTHPKFQKPKQLKDKADFCIIHYAGKVDYKADEWLMKNMDPLNDNIATLLHQSSDKFVSELWKDVDRIIGLDQVAGMSETALPGAFKTRKGMFRTVGQLYKEQLAKLMATLRNTNPNFVRCIIPNHEKKAGKLDPHLVLDQLRCNGVLEGIRICRQGFPNRVVFQEFRQRYEILTPNSIPKGFMDGKQACVLMIKALELDSNLYRIGQSKVFFRAGVLAHLEEERDLKITDVIIGFQACCRGYLARKAFAKRQQQLTAMKVLQRNCAAYLKLRNWQWWRLFTKVKPLLQVSRQEEEMMAKEEELVKVREKQLAAENRLTEMETLQSQLMAEKLQLQEQLQAETELCAEAEELRARLTAKKQELEEICHDLEARVEEEEERCQHLQAEKKKMQQNIQELEEQLEEEESARQKLQLEKVTTEAKLKKLEEEQIILEDQNCKLAKEKKLLEDRIAEFTTNLTEEEEKSKSLAKLKNKHEAMITDLEERLRREEKQRQELEKTRRKLEGDSTDLSDQIAELQAQIAELKMQLAKKEEELQAALARVEEEAAQKNMALKKIRELESQISELQEDLESERASRNKAEKQKRDLGEELEALKTELEDTLDSTAAQQELRSKREQEVNILKKTLEEEAKTHEAQIQEMRQKHSQAVEELAEQLEQTKRVKANLEKAKQTLENERGELANEVKVLLQGKGDSEHKRKKVEAQLQELQVKFNEGERVRTELADKVTKLQVELDNVTGLLSQSDSKSSKLTKDFSALESQLQDTQELLQEENRQKLSLSTKLKQVEDEKNSFREQLEEEEEAKHNLEKQIATLHAQVADMKKKMEDSVGCLETAEEVKRKLQKDLEGLSQRHEEKVAAYDKLEKTKTRLQQELDDLLVDLDHQRQSACNLEKKQKKFDQLLAEEKTISAKYAEERDRAEAEAREKETKALSLARALEEAMEQKAELERLNKQFRTEMEDLMSSKDDVGKSVHELEKSKRALEQQVEEMKTQLEELEDELQATEDAKLRLEVNLQAMKAQFERDLQGRDEQSEEKKKQLVRQVREMEAELEDERKQRSMAVAARKKLEMDLKDLEAHIDSANKNRDEAIKQLRKLQAQMKDCMRELDDTRASREEILAQAKENEKKLKSMEAEMIQLQEELAAAERAKRQAQQERDELADEIANSSGKGALALEEKRRLEARIAQLEEELEEEQGNTELINDRLKKANLQIDQINTDLNLERSHAQKNENARQQLERQNKELKVKLQEMEGTVKSKYKASITALEAKIAQLEEQLDNETKERQAACKQVRRTEKKLKDVLLQVDDERRNAEQYKDQADKASTRLKQLKRQLEEAEEEAQRANASRRKLQRELEDATETADAMNREVSSLKNKLRRGDLPFVVPRRMARKGAGDGSDEEVDGKADGAEAKPAE

SEQ ID NO: 116 - protein, 1731 aa, homo sapiens [sequence omitted]

SEQ ID NO: 117 - protein, 615 aa, Homo sapiens
MKALRLSASALFCLLLINGLGAAPPGRPEAQPPPLSSEHKEPVAGDAVPGPKDGSAPEVRGARNSEPQDEGELFQGVDPRALAAVLLQALDRPASPPAPSGSQQGPEEEAAEALLTETVRSQTHSLPAPESPEPAAPPRPQTPENGPEASDPSEELEALASLLQELRDFSPSSAKRQQETAAAETETRTHTLTRVNLESPGPERVWRASWGEFQARVPERAPLPPPAPSQFQARMPDSGPLPETHKFGEGVSSPKTHLGEALAPLSKAYQGVAAPFPKARRPESALLGGSEAGERLLQQGLAQVEAGRRQAEATRQAAAQEERLADLASDLLLQYLLQGGARQRGLGGRGLQEAAEERESAREEEEAEQERRGGEERVGEEDEEAAEAEAEAEEAERARQNALLFAEEEDGEAGAEDKRSQEETPGHRRKEAEGTEEGGEEEDDEEMDPQTIDSLIELSTKLHLPADDVVSIIEEVEEKRKRKKNAPPEPVPPPRAAPAPTHVRSPQPPPPAPAPARDELPDWNEVLPPWDREEDEVYPPGPYHPFPNYIRPRTLQPPSALRRRHYHHALPPSRHYPGREAQARRAQEEAEAEERRLQEQEELENYIEHVLLRRP

SEQ ID NO: 118 - protein, 733 aa, Homo sapiens
MGWMGEKTGKILTEFLQFYEDQYGVALFNSMRHEIEGTGLPQAQLLWRKVPLDERIVFSGNLFQHQEDSKKWRNRFSLVPHNYGLVLYENKAAYERQVPPRAVINSAGYKILTSVDQYLELIGNSLPGTTAKSGSAPILKCPTQFPLILWHPYARHYYFCMMTEAEQDKWQAVLQDCIRHCNNGIPEDSKVEGPAFTDAIRMYRQSKELYGTWEMLCGNEVQILSNLVMEELGPELKAELGPRLKGKPQERQRQWIQISDAVYHMVYEQAKARFEEVLSKVQQVQPAMQAVIRTDMDQIITSKEHLASKIRAFILPKAEVCVRNHVQPYIPSILEALMVPTSQGFTEVRDVFFKEVTDMNLNVINEGGIDKLGEYMEKLSRLAYHPLKMQSCYEKMESLRLDGLQQRFDVSSTSVFKQRAQIHMREQMDNAVYTFETLLHQELGKGPTKEELCKSIQRVLERVLKKYDYDSSSVRKRFFREALLQISIPFLLKKLAPTCKSELPRFQELIFEDFARFILVENTYEEVVLQTVMKDILQAVKEAAVQRKHNLYRDSMVMHNSDPNLHLLAEGAPIDWGEEYSNSGGGGSPSPSTPESATLSEKRRRAKQVVSVVQDEEVGLPFEASPESPPPASPDGVTEIRGLLAQGLRPESPPPAGPLLNGAPAGESPQPKAAPEASSPPASPLQHLLPGKAVDLGPPKPSDQETGEQVSSPSSHPALHTTTEDSAGVQTEF

SEQ ID NO: 119 - protein, 992 aa, homo sapiens
MRKLFSFGRRLGQALLSSMDQEYAGPGYDIRDWELRKIHRAAIKGDAAEVERCLTRRFRDLDARDRKDRTVLHLACAHGRVQVVTLLLHRRCQIDICDRLNRTPLMKAVHSQEEACAIVLLECGANPNIEDIYGNTALHYAVYNKGTSLAERLLSHHANIEALNKEGNTPLLFAINSRRQHMVEFLLKNQANIHAVDNFKRTALILAVQHNLSSIVTLLLQQNIRISSQDMFGQTAEDYALCSDLRSIRQQILEHKNKMLKNHLRNDNQETAAMKPANLKKRKERAKAEHNLKVASEEKQERLQRSENKQPQDSQSYGKKKDAMYGNFMLKKDIAMLKEELYAIKNDSLRKEKKYIQEIKSITEINANFEKSVRLNEKMITKTVARYSQQLNDLKAENARLNSELEKEKHNKERLEAEVESLHSSLATAINEYNEIVERKDLELVLWRADDVSRHEKMGSNISQLTDKNELLTEQVHKARVKFNTLKGKLRETRDALREKTLALGSVQLDLRQAQHRIKEMKQMHPNGEAKESQSIGKQNSLEERIRQQELENLLLERQLEDARKEGDNKEIVINIHRDCLENGKEDLLEERNKELMKEYNYLKEKLLQCEKEKAEREVIVREFQEELVDHLKTFSISESPLEGTSHCHINLNETWTSKKKLFQVEIQPEEKHEEFRKLFELISLLNYTADQIRKKNRELEEEATGYKKCLEMTINMLNAFANEDFSCHGDLNTDQLKMDILFKKLKQKFNDLVAEKEAVSSECVNLAKDNEVLHQELLSMRNVQEKCEKLEKDKKMLEEEVLNLKTHMEKDMVELGKLQEYKSELDERAVQEIEKLEEIHLQKQAEYEKQLEQLNKDNTASLKKKELTLKDVECKFSKMKTAYEEVTTELEEFKEAFAGAVKANNSMSKKLMKSDKKIAVISTKLFTEKQRMKYFLSTLPTRPEPELPCVENLNSIELNRKYIPKTAIRIPTSNPQTSNNCKNFLTEVLLC

SEQ ID NO: 120 - protein, 1158 aa, Homo sapiens
MTHGEELGSDVHQDSIVLTYLEGLLMHQAAGGSGTAVDKKSAGHNEEDQNFNISGSAFPTCQSNGPVLNTHTYQGSGMLHLKKARLLQSSEDWNAAKRKRLSDSIMNLNVKKEALLAGMVDSVPKGKQDSTLLASLLQSFSSRLQTVALSQQIRQSLKEQGYALSHDSLKVEKDLRCYGVASSHLKTLLKKSKVKDQKPDTNLPDVTKNLIRDRFAESPHHVGQSGTKVMSEPLSCAARLQAVASMVEKRASPATSPKPSVACSQLALLLSSEAHLQQYSREHALKTQNANQAASERLAAMARLQENGQKDVGSYQLPKGMSSHLNGQARTSSSKLMASKSSATVFQNPMGIIPSSPKNAGYKNSLERNNIKQAANNSLLLHLLKSQTIPKPMNGHSHSERGSIFEESSTPTTIDEYSDNNPSFTDDSSGDESSYSNCVPIDLSCKHRTEKSESDQPVSLDNFTQSLLNTWDPKVPDVDIKEDQDTSKNSKLNSHQKVTLLQLLLGHKNEENVEKNTSPQGVHNDVSKFNTQNYARTSVIESPSTNRTTPVSTPPLLTSSKAGSPINLSQHSLVIKWNSPPYVCSTQSEKLTNTASNHSMDLTKSKDPPGEKPAQNEGAQNSATFSASKLLQNLAQCGMQSSMSVEEQRPSKQLLTGNTDKPIGMIDRLNSPLLSNKTNAVEENKAFSSQPTGPEPGLSGSEIENLLERRTVLQLLLGNPNKGKSEKKEKTPLRDESTQEHSERALSEQILMVKIKSEPCDDLQIPNTNVHLSHDAKSAPFLGMAPAVQRSAPALPVSEDFKSEPVSPQDFSFSKNGLLSRLLRQNQDSYLADDSDRSHRNNEMALLESKNLCMVPKKRKLYTEPLENPFKKMKNNIVDAANNHSAPEVLYGSLLNQEELKFSRNDLEFKYPAGHGSASESEHRSWARESKSFNVLKQLLLSENCVRDLSPHRSNSVADSKKKGHKNNVTNSKPEFSISSLNGLMYSSTQPSSCMDNRTFSYPGVVKTPVSPTFPEHLGCAGSRPESGLLNGCSMPSEKGPIKWVITDAEKNEYEKDSPRLTKTNPILYYMLQKGGNSVTSRETQDKDIWREASSAESVSQVTAKEELLPTAETKASFFNLRSPYNSHMGNNASRPHSANGEVYGLLGSVLTIKKESE

SEQ ID NO: 121 - protein, 425 aa, Homo sapiens
MEPSATPGAQMGVPPGSREPSPVPPDYEDEFLRYLWRDYLYPKQYEWVLIAAYVAVFVVALVGNTLVCLAVWRNHHMRTVTNYFIVNLSLADVLVTAICLPASLLVDITESWLFGHALCKVIPYLQAVSVSVAVLTLSFIALDRWYAICHPLLFKSTARRARGSILGIWAVSLAIMVPQAAVMECSSVLPELANRTRLFSVCDERWADDLYPKIYHSCFFIVTYLAPLGLMAMAYFQIFRKLWGRQIPGTTSALVRNWKRPSDQLGDLEQGLSGEPQPRARAFLAEVKQMRARRKTAKMLMVVLLVFALCYLPISVLNVLKRVFGMFRQASDREAVYACFTFSHWLVYANSAANPIIYNFLSGKFREQFKAAFSCCLPGLGPCGSLKAPSPRSSASHKSLSLQSRCSISKISEHVVLTSVTTVLP

SEQ ID NO: 122 - protein, 314 aa, Homo sapiens
MRIAVICFCLLGITCAIPVKQADSGSSEEKQLYNKYPDAVATWLNPDPSQKQNLLAPQNAVSSEETNDFKQETLPSKSNESHDHMDDMDDEDDDDHVDSQDSIDSNDSDDVDDTDDSHQSDESHHSDESDELVTDFPTDLPATEVFTPVVPTVDTYDGRGDSVVYGLRSKSKKFRRPDIQYPDATDEDITSHMESEELNGAYKAIPVAQDLNAPSDWDSRGKDSYETSQLDDQSAETHSHKQSRLYKRKANDESNEHSDVIDSQELSKVSREFHSHEFHSHEDMLVVDPKSKEEDKHLKFRISHELDSASSEVN

SEQ ID NO: 123 - protein, 1153 aa, Homo sapiens
MSQEPTTYSLFLFLFLSHGVSSYTVPNSRQDLHPLLQNMAEEIIDGSYLNALLDLIQFQSSHVWTDDLSHRVLAYLNSRNVAFTIPSLQAAVENHLEQRLHQPQKLLEDLRKTDAQQFRTAMKCLLEDKKDGLDLKDIIIDLGEIRERALQSPGVNRSLFLITLERCFQMLNSLECVEILGKVLRGSSGSFLQPDITERLPRDLREDAFKNLSAVFKDLYDKTSAHSQRALYSWMTGILQTSSNATDDSASWVSAEHLWVLGRYMVHLSFEEITKISPIEIGLFISYDNATKQLDMVYDITPELAQAFLERISSSNFNMRNTSTIHRQAHELWALEPFPKMLGLLVCFYNDLELLDATVAQVLLYQMIKCSHLRGFQAGVQKLKAELLDIAMENQTLNETLGSLSDAVVGLTYSQLESLSPEAVHGAISTLNQVSGWAKSQVIILSAKYLAHEKVLSFYNVSQMGALLAGVSTQAFCSMKRKDISQVLRSAVSQYVSDLSPAQQQGILSKMVQAEDTAPGIVEIQGAFFKEVSLFDLRRQPGFNSTVLKDKELGRSQALFLYELLLKTTRRPEELLSAGQLVKGVTCSHIDAMSTDFFLAHFQDFQNNFALLSPYQVNCLAWKYWEVSRLSMPPFLLAALPARYLASVPASQCVPFLISLGKSWLDSLVLDSHKKTSVLRKVQQCLDDSIADEYTVDIMGNLLCHLPAAIIDRGISPRAWATALHGLRDCPDLNPEQKAAVRLKLLGQYGLPQHWTAETTKDLGPFLVLFSGDELSSIATKFPEILLQAASKMARTLPTKEFLWAVFQSVRNSSDKIPSYDPMPGCHGVVAPSSDDIFKLAEANACWALEDLRCMEEDTFIRTVELLGAVQGFSRPQLMTLKEKAIQVWDMPSYWREHHIVSLGRIALALNESELEQLDLSSIDTVASLSWQTEWTPGQAESILQGYLDDSGYSIQDLKSFHLVGLGATLCAINITEIPLIKISEFRVVVARIGTLLCSTHVLAEFKRKAEVVFGDPTEWTSSVLQELGTIAAGLTKAELRMLDKDLMPYFQPSAIKCLPDEIFKELSAEQIASLGPENAAAVTHAQRRRLSPLQLQSLQQALDGAKTHSWQDAPASAGPTRTSSSRSPAGALQSWGLWLGCPLLVLMAKLLW

SEQ ID NO: 124 - protein, 224 aa, Homo sapiens
MPGGLLLGDVAPNFEANTTVGRIRFHDFLGDSWGILFSHPRDFTPVCTTELGRAAKLAPEFAKRNVKLIALSIDSVEDHLAWSKDINAYNCEEPTEKLPFPIIDDRNRELAILLGMLDPAEKDEKGMPVTARVVFVFGPDKKLKLSILYPATTGRNFDEILRVVISLQLTAEKRVATPVDWKDGDSVMVLPTIPEEEAKKLFPKGVFTKELPSGKKYLRYTPQP

SEQ ID NO: 125 - protein, 882 aa, Homo sapiens
MPGRARTRARGRARRRESYQQEAPGGPRAPGSATTQEPPQLQSTPRPLQEEVPVVRPLQPRAARGGAGGGAQSQGVKEPGPEAGLHTAPLQERRIGGVFQDLVVNTRQDMKHVKDSKTGSEGTVVQLLANHFRVISRPQWVAYKYNVDYKPDIEDGNLRTILLDQHRRKFGERHIFDGNSLLLSRPLKERRVEWLSTTKDKNIVKITVEFSKELTPTSPDCLRYYNILFRRTFKLLDFEQVGRNYYTKKKAIQLYRHGTSLEIWLGYVTSVLQYENSITLCADVSHKLLRIETAYDFIKRTSAQAQTGNIREEVTNKLIGSIVLTKYNNKTYRVDDIDWKQNPEDTFNKSDGSKITYIDYYRQQHKEIVTVKKQPLLVSQGRWKKGLTGTQREPILLIPQLCHMTGLTDEICKDYSIVKELAKHTRLSPRRRHHTLKEFINTLQDNKKVRELLQLWDLKFDTNFLSVPGRVLKNANIVQGRRMVKANSQGDWSREIRELPLLNAMPLHSWLILYSRSSHREAMSLKGHLQSVTAPMGITMKPAEMIEVDGDANSYIDTLRKYTRPTLQMGMSCLLVFKVICILPNDDKRRYDSIKRYLCTKCPIPSQCVVKKTLEKVQARTIVTKIAQQMNCKMGGALWKVETDVQRTMFVGIDCFHDIVNRQKSIAGFVASTNAELTKWYSQCVIQKTGEELVKELEICLKAALDVWCKNESSMPHSVIVYRDGVGDGQLQALLDHEAKKMSTYLKTISPNNFTLAFIVVKKRINTRFFLKHGSNFQNPPPGTVIDVELTRNEWYDFFIVSQSVQDGTVTPTHYNVIYDTIGLSPDTVQRLTYCLCHMYYNLPGIIRVPAPCHYAHKLAYLVGQSIHQEPNRSLSTRLFYL

SEQ ID NO: 126 - protein, 500 aa, Homo sapiens
MASRLTLLTLLLLLLAGDRASSNPNATSSSSQDPESLQDRGEGKVATTVISKMLFVEPILEVSSLPTTNSTTNSATKITANTTDEPTTQPTTEPTTQPTIQPTQPTTQLPTDSPTQPTTGSFCPGPVTLCSDLESHSTEAVLGDALVDFSLKLYHAFSAMKKVETNMAFSPFSIASLLTQVLLGAGENTKTNLESILSYPKDFTCVHQALKGFTTKGVTSVSQIFHSPDLAIRDTFVNASRTLYSSSPRVLSNNSDANLELINTWVAKNTNNKISRLLDSLPSDTRLVLLNAIYLSAKWKTTFDPKKTRMEPFHFKNSVIKVPMMNSKKYPVAHFIDQTLKAKVGQLQLSHNLSLVILVPQNLKHRLEDMEQALSPSVFKAIMEKLEMSKFQPTLLTLPRIKVTTSQDMLSIMEKLEFFDFSYDLNLCGLTEDPDLQVSAMQHQTVLELTETGVEAAAASAISVARTLLVFEVQQPFLFVLWDQQHKFPVFMGRVYDPRA

SEQ ID NO: 127 - protein, 402 aa, Homo sapiens [sequence omitted]

SEQ ID NO: 128 - protein, 549 aa, Homo sapiens
MATPRGLGALLLLLLLPTSGQEKPTEGPRNTCLGSNNMYDIFNLNDKALCFTKCRQSGSDSCNVENLQRYWLNYEAHLMKEGLTQKVNTPFLKALVQNLSTNTAEDFYFSLEPSQVPRQVMKDEDKPPDRVRLPKSLFRSLPGNRSVVRLAVTILDIGPGTLFKGPRLGLGDGSGVLNNRLVGLSVGQMHVTKLAEPLEIVFSHQRPPPNMTLTCVFWDVTKGTTGDWSSEGCSTEVRPEGTVCCCDHLTFFALLLRPTLDQSTVHILTRISQAGCGVSMIFLAFTIILYAFLRLSRERFKSEDAPKIHVALGGSLFLLNLAFLVNVGSGSKGSDAACWARGAVFHYFLLCAFTWMGLEAFHLYLLAVRVFNTYFGHYFLKLSLVGWGLPALMVIGTGSANSYGLYTIRDRENRTSLELCWFREGTTMYALYITVHGYFLITFLFGMVVLALVVWKIFTLSRATAVKERGKNRKKVLTLLGLSSLVGVTWGLAIFTPLGLSTVYIFALFNSLQGVFICCWFTILYLPSQSTTVSSSTARLDQAHSASQE

SEQ ID NO: 129 - protein, 2677 aa, Homo sapiens
MSTCCWCTPGGASTIDFLKRYASNTPSGEFQTADEDLCYCLECVAEYHKARDELPFLHEVLWELETLRLINHFEKSMKAEIGDDDELYIVDNNGEMPLFDITGQDFENKLRVPLLEILKYPYLLLHERVNELCVEALCRMEQANCSFQVFDKHPGIYLFLVHPNEMVRRWAILTARNLGKVDRDDYYDLQEVLLCLFKVIELGLLESPDIYTSSVLEKGKLILLPSHMYDTTNYKSYWLGICMLLTILEEQAMDSLLLGSDKQNDFMQSILHTMEREADDDSVDPFWPALHCFMVILDRLGSKVWGQLMDPIVAFQTIINNASYNREIRHIRNSSVRTKLEPESYLDDMVTCSQIVYNYNPEKTKKDSGWRTAICPDYCPNMYEEMETLASVLQSDIGQDMRVHNSTFLWFIPFVQSLMDLKDLGVAYIAQVVNHLYSEVKEVLNQTDAVCDKVTEFFLLILVSVIELHRNKKCLHLLWVSSQQWVEAVVKCAKLPTTAFTRSSEKSSGNCSKGTAMISSLSLHSMPSNSVQLAYVQLIRSLLKEGYQLGQQSLCKRFWDKLNLFLRGNLSLGWQLTSQETHELQSCLKQIIRNIKFKAPPCNTFVDLTSACKISPASYNKEESEQMGKTSRKDMHCLEASSPTFSKEPMKVQDSVLIKADNTIEGDNNEQNYIKDVKLEDHLLAGSCLKQSSKNIFTERAEDQIKISTRKQKSVKEISSYTPKDCTSRNGPERGCDRGIIVSTRLLTDSSTDALEKVSTSNEDFSLKDDALAKTSKRKTKVQKDEICAKLSHVIKKQHRKSTLVDNTINLDENLTVSNIESFYSRKDTGVQKGDGFIHNLSLDPSGVLDDKNGEQKSQNNVLPKEKQLKNEELVIFSFHENNCKIQEFHVDGKELIPFTEMTNASEKKSSPFKDLMTVPESRDEEMSNSTSVIYSNLTREQAPDISPKSDTLTDSQIDRDLHKLSLLAQASVITFPSDSPQNSSQLQRKVKEDKRCFTANQNNVGDTSRGQVIIISDSDDDDDERILSLEKLTKQDKICLEREHPEQHVSTVNSKEEKNPVKEEKTETLFQFEESDSQCFEFESSSEVFSVWQDHPDDNNSVQDGEKKCLAPIANTTNGQGCTDYVSEVVKKGAEGIEEHTRPRSISVEEFCEIEVKKPKRKRSEKPMAEDPVRPSSSVRNEGQSDTNKRDLVGNDFKSIDRRTSTPNSRIQRATTVSQKKSSKLCTCTEPIRKVPVSKTPKKTHSDAKKGQNRSSNYLSCRTTPAIVPPKKFRQCPEPTSTAEKLGLKKGPRKAYELSQRSLDYVAQLRDHGKTVGVVDTRKKTKLISPQNLSVRNNKKLLTSQELQMQRQIRPKSQKNRRRLSDCESTDVKRAGSHTAQNSDIFVPESDRSDYNCTGGTEVLANSNRKQLIKCMPSEPETIKAKHGSPATDDACPLNQCDSVVLNGTVPTNEVIVSTSEDPLGGGDPTARHIEMAALKEGEPDSSSDAEEDNLFLTQNDPEDMDLCSQMENDNYKLIELIHGKDTVEVEEDSVSRPQLESLSGTKCKYKDCLETTKNQGEYCPKHSEVKAADEDVFRKPGLPPPASKPLRPTTKIFSSKSTSRIAGLSKSLETSSALSPSLKNKSKGIQSILKVPQPVPLIAQKPVGEMKNSCNVLHPQSPNNSNRQGCKVPFGESKYFPSSSPVNILLSSQSVSDTFVKEVLKWKYEMFLNFGQCGPPASLCQSISRPVPVRFHNYGDYFNVFFPLMVLNTFETVAQEWLNSPNRENFYQLQVRKFPADYIKYWEFAVYLEECELAKQLYPKENDLVFLAPERINEEKKDTERNDIQDLHEYHSGYVHKFRRTSVMRNGKTECYLSIQTQENFPANLNELVNCIVISSLVTTQRKLKAMSLLGSRNQLARAVLNPNPMDFCTKDLLTTTSERIIAYLRDFNEDQKKAIETAYAMVKHSPSVAKICLIHGPPGTGKSKTIVGLLYRLLTENQRKGHSDENSNAKIKQNRVLVCAPSNAAVDELMKKIILEFKEKCKDKKNPLGNCGDINLVRLGPEKSINSEVLKFSLDSQVNHRMKKELPSHVQAMHKRKEFLDYQLDELSRQRALCRGGREIQRQELDENISKVSKERQELASKIKEVQGRPQKTQSIIILESHIICCTLSTSGGLLLESAFRGQGGVPFSCVIVDEAGQSCEIETLTPLIHRCNKLILVGDPKQLPPTVISMKAQEYGYDQSMMARFCRLLEENVEHNMISRLPILQLTVQYRMHPDICLFPSNYVYNRNLKTNRQTEAIRCSSDWPFQPYLVFDVGDGSERRDNDSYINVQEIKLVMEIIKLIKDKRKDVSFRNIGIITHYKAQKTMIQKDLDKEFDRKGPAEVDTVDAFQGRQKDCVIVTCVRANSIQGSIGFLASLQRLNVTITRAKYSLFILGHLRTLMENQHWNQLIQDAQKRGAIIKTCDKNYRHDAVKILKLKPVLQRSLTHPPTIAPEGSRPQGGLPSSKLDSGFAKTSVAASLYHTPSDSKEITLTVTSKDPERPPVHDQLQDPRLLKRMGIEVKGGIFLWDPQPSSPQHPGATPPTGEPGFPVVHQDLSHIQQPAAVVAALSSHKPPVRGEPPAASPEASTCQSKCDDPEEELCHRREARAFSEGEQEKCGSETHHTRRNSRWDKRTLEQEDSSSKKRKLL

SEQ ID NO: 130 - protein, 613 aa, Homo sapiens
MFRCGGLAAGALKQKLVPLVRTVCVRSPRQRNRLPGNLFQRWHVPLELQMTRQMASSGASGGKIDNSVLVLIVGLSTVGAGAYAYKTMKEDEKRYNERISGLGLTPEQKQKKAALSASEGEEVPQDKAPSHVPFLLIGGGTAAFAAARSIRARDPGARVLIVSEDPELPYMRPPLSKELWFSDDPNVTKTLRFKQWNGKERSIYFQPPSFYVSAQDLPHIENGGVAVLTGKKVVQLDVRDNMVKLNDGSQITYEKCLIATGGTPRSLSAIDRAGAEVKSRTTLFRKIGDFRSLEKISREVKSITIIGGGFLGSELACALGRKARALGTEVIQLFPEKGNMGKILPEYLSNWTMEKVRREGVKVMPNAIVQSVGVSSGKLLIKLKDGRKVETDHIVAAVGLEPNVELAKTGGLEIDSDFGGFRVNAELQARSNIWVAGDAACFYDIKLGRRRVEHHDHAVVSGRLAGENMTGAAKPYWHQSMFWSDLGPDVGYEAIGLVDSSLPTVGVFAKATAQDNPKSATEQSGTGIRSESETESEASEITIPPSTPAVPQAPVQGEDYGKGVIFYLRDKVVVGIVLWNIFNRMPIARKIIKDGEQHEDLNEVAKLFNIHED

SEQ ID NO: 131 - protein, 634 aa, Homo sapiens
MSLVPATNYIYTPLNQLKGGTIVNVYGVVKFFKPPYLSKGTDYCSVVTIVDQTNVKLTCLLFSGNYEALPIIYKNGDIVRFHRLKIQVYKKETQGITSSGFASLTFEGTLGAPIIPRTSSKYFNFTTEDHKMVEALRVWASTHMSPSWTLLKLCDVQPMQYFDLTCQLLGKAEVDGASFLLKVWDGTRTPFPSWRVLIQDLVLEGDLSHIHRLQNLTIDILVYDNHVHVARSLKVGSFLRIYSLHTKLQSMNSENQTMLSLEFHLHGGTSYGRGIRVLPESNSDVDQLKKDLESANLTANQHSDVICQSEPDDSFPSSGSVSLYEVERCQQLSATILTDHQYLERTPLCAILKQKAPQQYRIRAKLRSYKPRRLFQSVKLHCPKCHLLQEVPHEGDLDIIFQDGATKTPDVKLQNTSLYDSKIWTTKNQKGRKVAVHFVKNNGILPLSNECLLLIEGGTLSEICKLSNKFNSVIPVRSGHEDLELLDLSAPFLIQGTIHHYGCKQCSSLRSIQNLNSLVDKTSWIPSSVAEALGIVPLQYVFVMTFTLDDGTGVLEAYLMDSDKFFQIPASEVLMDDDLQKSVDMIMDMFCPPGIKIDAYPWLECFIKSYNVTNGTDNQICYQIFDTTVAEDVI

SEQ ID NO: 132 - protein, 342 aa, Homo sapiens
MSEESDSLRTSPSVASLSENELPPPPEPPGYVCSLTEDLVTKAREELQEKPEWRLRDVQALRDMVRKEYPNLSTSLDDAFLLRFLRARKFDYDRALQLLVNYHSCRRSWPEVFNNLKPSALKDVLASGFLTVLPHTDPRGCHVVCIRPDRWIPSNYPITENIRAIYLTLEKLIQSEETQVNGIVILADYKGVSLSKASHFGPFIAKKVIGILQDGFPIRIKAVHVVNEPRIFKGIFAIIKPFLKEKIANRFFLHGSDLNSLHTNLPRSILPKEYGGTAGELDTATWNAVLLASEDDFVKEFCQPVPACDSILGQTLLPEGLTSDAQCDDSLRAVKSQLYSCY

SEQ ID NO: 133 - protein, 319 aa, Homo sapiens
MVLSELAARLNCAEYKNWVKAGHCLLLLRSCLQGFVGREVLSFHRGLLAAAPGLGPRAVCRGGSRCSPRARQFQPQCQVCAEWKREILRHHVNRNGDVHWGNCRPGRWPVDAWEVAKAFMPRGLADKQGPEECDAVALLSLINSCDHFVVDRKKVTEVIKCRNEIMHSSEMKVSSTWLRDFQMKIQNFLNEFKNIPEIVAVYSRIEQLLTSDWAVHIPEEDQRDGCECEMGTYLSESQVNEIEMQLLKEKLQEIYLQAEEQEVLPEELSNRLEVVKEFLRNNEDLRNGLTEDMQKLDSLCLHQKLDSQEPGRQTPDRKA

SEQ ID NO: 134 - protein, 495 aa, Homo sapiens
MKKRKELNALIGLAGDSRRKKPKKGPSSHRLLRTEPPDSDSESSSEEEEEFGVVGNRSRFAKGDYLRCCKICYPLCGFVILAACVVACVGLVWMQVALKEDLDALKEKFRTMESNQKSSFQEIPKLNEELLSKQKQLEKIESGEMGLNKVWINITEMNKQISLLTSAVNHLKANVKSAADLISLPTTVEGLQKSVASIGNTLNSVHLAVEALQKTVDEHKKTMELLQSDMNQHFLKETPGSNQIIPSPSATSELDNKTHSENLKQDILYLHNSLEEVNSALVGYQRQNDLKLEGMNETVSNLTQRVNLIESDVVAMSKVEKKANLSFSMMGDRSATLKRQSLDQVTNRTDTVKIQSIKKEDSSNSQVSKLREKLQLISALTNKPESNRPPETADEEQVESFTSKPSALPKFSQFLGDPVEKAAQLRPISLPGVSSTEDLQDLFRKTGQDVDGKLTYQEIWTSLGSAMPEPESLRAFDSDGDGRYSFLELRVALGI

SEQ ID NO: 135 - protein, 111 aa, Homo sapiens
MSDAAVDTSSEITTKDLKEKKEVVEEAENGRDAPANGNAENEENGEQEADNEVDEEEEEGGEEEEEEEEGDGEEEDGDEDEEAESATGKRAAEDDEDDDVDTKKQKTDEDD

SEQ ID NO: 136 - protein, 36 aa, Homo sapiens
MAAGTAVGACASGGGPIGGGARRWSSSSWWNRNPDL

SEQ ID NO: 137 - protein, 517 aa, Homo sapiens
MDPAGAADPSVPPNPLTHLSLQDRSEMQLQSEADRRSLPGTWTRSSPEHTTILRGGVRRCLQQQCEQTVRILHAKVAQKSYGNEKRFFCPPPCVYLSGPGWRVKPGQDQAHQAGETGPTVCGYMGLDSASGSATETQKLNFEQQPDSREFGCAKTLYISDADKRKHFRLVLRLVLRGGRELGTFHSRLIKVISKPSQKKQSLKNTDLCISSGSKVSLFNRLRSQTVSTRYLSVEDGAFVASARQWAAFTLHLADGHSAQGDFPPREGYVRYGSLVQLVCTVTGITLPPMIIRKVAKQCALLDVDEPISQLHKCAFQFPGSPPGGGGTYLCLATEKVVQFQASPCPKEANRALLNDSSCWTIIGTESVEFSFSTSLACTLEPVTPVPLISTLELSGGGDVATLELHGENFHAGLKVWFGDVEAETMYRSPRSLVCVVPDVAAFCSDWRWLRAPITIPMSLVRADGLFYPSAFSFTYTPEYSVRPGHPGVPEPATDADALLESIHQEFTRTNFHLFIQT

SEQ ID NO: 138 - protein, 1435 aa, Homo sapiens
MAQTPDGISCELRGEITRFLWPKEVELLLKTWLPGEGAVQNHVLALLRWRAYLLHTTCLPLRVDCTFSYLEVQAMALQETPPQVTFELESLRELVLEFPGVAALEQLAQHVAAAIKKVFPRSTLGKLFRRPTPASMLARLERSSPSESTDPCSPCGGFLETYEALCDYNGFPFREEIQWDVDTIYHRQGCRHFSLGDFSHLGSRDLALSVAALSYNLWFRCLSCVDMKLSLEVSEQILHMMSQSSHLEELVLETCSLRGDFVRRLAQALAGHSSSGLRELSLAGNLLDDRGMTALSRHLERCPGALRRLSLAQTGLTPRGMRALGRALATNAAFDSTLTHLDLSGNPGALGASEDSGGLYSFLSRPNVLSFLNLAGTDTALDTVRGCSVGGWMTGRADWRAGRGGLGPPAGVANSLPPQLFAAVSRGCCTSLTHLDASRNVFSRTKSRAAPAALQLFLSRARTLRHLGLAGCKLPPDALRALLDGLALNTHLRDLHLDLSACELRSAGAQVIQDLVCDAGAVSSLDLADNGFGSDMVTLVLAIGRSRSLRHVALGRNFNVRCKETLDDVLHRIVQLMQDDDCPLQSLSVAESRLKLGASVLLRALATNPNLTALDISGNAMGDAGAKLLAKALRVNSRLRSVVWDRNHTSALGLLDVAQALEQNHSLKAMPLPLNDVAQAQRSRPELTARAVHQIQACLLRNNRADPASSDHTTRLQPLGLVSDPSEQEVNELCQSVQEHVELLGCGAGPQGEAAVRQAEDAIQNANFSLSILPILYEAGSSPSHHWQLGQKLEGLLRQVGEVCRQDIQDFTQATLDTARSLCPQMLQGSSWREQLEGVLAGSRGLPELLPEQLLQDAFTRLRDMRLSITGTLAESIVAQALAGLSAARDQLVESLAQQATVTMPPALPAPDGGEPSLLEPGELEGLFFPEEKEEEKEKDDSPPQKWPELSHGLHLVPFIHSAAEEAEPEPELAAPGEDAEPQAGPSARGSPSPAAPGPPAGPLPRMDLPLAGQPLRHPTRARPRPRRQHHHRPPPGGPQVPPALPQEGNGLSARVDEGVEEFFSKRLIQQDRLWAPEEDPATEGGATPVPRTLRKKLGTLFAFKKPRSTRGPRTDLETSPGAAPRTRKTTFGDLLRPPTRPSRGEELGGAEGDTSSPDPAGRSRPRYTRDSKAYSMILLPAEEEATLGARPDKRRPLERGETELAPSFEQRVQVMLQRIGVSRGSGGAEGKRKQSKDGEIKKAGSDGDIMDSSTEAPPISIKSRTHSVSADPSCRPGPGSQGPESATWKTLGQQLNAELRSRGWGQQDGPGPPSPGQSPSPCRTSPSPDSLGLPEDPCLGPRNEDGQLRPRPLSAGRRAVSVHEDQLQAPAERPLRLQRSPVLKRRPKLEAPPSPSLGSGLGTEPLPPQPTEPSSPERSPPSPATDQRGGGPNP

SEQ ID NO: 139 - protein, 1354 aa, Homo sapiens
MSTGDSFETRFEKMDNLLRDPKSEVNSDCLLDGLDALVYDLDFPALRKNKNIDNFLSRYKDTINKIRDLRMKAEDYEVVKVIGRGAFGEVQLVRHKSTRKVYAMKLLSKFEMIKRSDSAFFWEERDIMAFANSPWVVQLFYAFQDDRYLYMVMEYMPGGDLVNLMSNYDVPEKWARFYTAEVVLALDAIHSMGFIHRDVKPDNMLLDKSGHLKLADFGTCMKMNKEGMVRCDTAVGTPDYISPEVLKSQGGDGYYGRECDWWSVGVFLYEMLVGDTPFYADSLVGTYSKIMNHKNSLTFPDDNDISKEAKNLICAFLTDREVRLGRNGVEEIKRHLFFKNDQWAWETLRDTVAPVVPDLSSDIDTSNFDDLEEDKGEEETFPIPKAFVGNQLPFVGFTYYSNRRYLSSANPNDNRTSSNADKSLQESLQKTIYKLEEQLHNEMQLKDEMEQKCRTSNIKLDKIMKELDEEGNQRRNLESTVSQIEKEKMLLQHRINEYQRKAEQENEKRRNVENEVSTLKDQLEDLKKVSQNSQLANEKLSQLQKQLEEANDLLRTESDTAVRLRKSHTEMSKSISQLESLNRELQERNRILENSKSQTDKDYYQLQAILEAERRDRGHDSEMIGDLQARITSLQEEVKHLKHNLEKVEGERKEAQDMLNHSEKEKNNLEIDLNYKLKSLQQRLEQEVNEHKVTKARLTDKHQSIEEAKSVAMCEMEKKLKEEREAREKAENRVVQIEKQCSMLDVDLKQSQQKLEHLTGNKERMEDEVKNLTLQLEQESNKRLLLQNELKTQAFEADNLKGLEKQMKQEINTLLEAKRLLEFELAQLTKQYRGNEGQMRELQDQLEAEQYFSTLYKTQVKELKEEIEEKNRENLKKIQELQNEKETLATQLDLAETKAESEQLARGLLEEQYFELTQESKKAASRNRQEITDKDHTVSRLEEANSMLTKDIEILRRENEELTEKMKKAEEEYKLEKEEEISNLKAAFEKNINTERTLKTQAVNKLAEIMNRKDFKIDRKKANTQDLRKKEKENRKLQLELNQEREKFNQMVVKHQKELNDMQAQLVEECAHRNELQMQLASKESDIEQLRAKLLDLSDSTSVASFPSADETDGNLPESRIEGWLSVPNRGNIKRYGWKKQYVVVSSKKILFYNDEQDKEQSNPSMVLDIDKLFHVRPVTQGDVYRAETEEIPKIFQILYANEGECRKDVEMEPVQQAEKTNFQNHKGHEFIPTLYHFPANCDACAKPLWHVFKPPPALECRRCHVKCHRDHLDKKEDLICPCKVSYDVTSARDMLLLACSQDEQKKWVTHLVKKIPKNPPSGFVRASPRTLSTRSTANQSFRKVVKNTSGKTS

SEQ ID NO: 140 - protein, 970 aa, Homo sapiens
MATCIGEKIEDFKVGNLLGKGSFAGVYRAESIHTGLEVAIKMIDKKAMYKAGMVQRVQNEVKIHCQLKHPSILELYNYFEDSNYVYLVLEMCHNGEMNRYLKNRVKPFSENEARHFMHQIITGMLYLHSHGILHRDLTLSNLLLTRNMNIKIADFGLATQLKMPHEKHYTLCGTPNYISPEIATRSAHGLESDVWSLGCMFYTLLIGRPPFDTDTVKNTLNKVVLADYEMPSFLSIEAKDLIHQLLRRNPADRLSLSSVLDHPFMSRNSSTKSKDLGTVEDSIDSGHATISTAITASSSTSISGSLFDKRRLLIGQPLPNKMTVFPKNKSSTDFSSSGDGNSFYTQWGNQETSNSGRGRVIQDAEERPHSRYLRRAYSSDRSGTSNSQSQAKTYTMERCHSAEMLSVSKRSGGGENEERYSPTDNNANIFNFFKEKTSSSSGSFERPDNNQALSNHLCPGKTPFPFADPTPQTETVQQWFGNLQINAHLRKTTEYDSISPNRDFQGHPDLQKDTSKNAWTDTKVKKNSDASDNAHSVKQQNTMKYMTALHSKPEIIQQECVFGSDPLSEQSKTRGMEPPWGYQNRTLRSITSPLVAHRLKPIRQKTKKAVVSILDSEEVCVELVKEYASQEYVKEVLQISSDGNTITIYYPNGGRGFPLADRPPSPTDNISRYSFDNLPEKYWRKYQYASRFVQLVRSKSPKITYFTRYAKCILMENSPGADFEVWFYDGVKIHKTEDFIQVIEKTGKSYTLKSESEVNSLKEEIKMYMDHANEGHRICLALESIISEEERKTRSAPFFPIIIGRKPGSTSSPKALSPPPSVDSNYPTRERASFNRMVMHSAASPTQAPILNPSMVTNEGLGLTTTASGTDISSNSLKDCLPKSAQLLKSVFVKNVGWATQLTSGAVWVQFNDGSQLVVQAGVSSISYTSPNGQTTRYGENEKLPDYIKQKLQCLSSILLMFSNPTPNFH

SEQ ID NO: 141 - protein, 698 aa, Homo sapiens
MRLAVGALLVCAVLGLCLAVPDKTVRWCAVSEHEATKCQSFRDHMKSVIPSDGPSVACVKKASYLDCIRAIAANEADAVTLDAGLVYDAYLAPNNLKPVVAEFYGSKEDPQTFYYAVAVVKKDSGFQMNQLRGKKSCHTGLGRSAGWNIPIGLLYCDLPEPRKPLEKAVANFFSGSCAPCADGTDFPQLCQLCPGCGCSTLNQYFGYSGAFKCLKDGAGDVAFVKHSTIFENLANKADRDQYELLCLDNTRKPVDEYKDCHLAQVPSHTVVARSMGGKEDLIWELLNQAQEHFGKDKSKEFQLFSSPHGKDLLFKDSAHGFLKVPPRMDAKMYLGYEYVTAIRNLREGTCPEAPTDECKPVKWCALSHHERLKCDEWSVNSVGKIECVSAETTEDCIAKIMNGEADAMSLDGGFVYIAGKCGLVPVLAENYNKSDNCEDTPEAGYFAVAVVKKSASDLTWDNLKGKKSCHTAVGRTAGWNIPMGLLYNKINHCRFDEFFSEGCAPGSKKDSSLCKLCMGSGLNLCEPNNKEGYYGYTGAFRCLVEKGDVAFVKHQTVPQNTGGKNPDPWAKNLNEKDYELLCLDGTRKPVEEYANCHLARAPNHAVVTRKDKEACVHKILRQQQHLFGSNVTDCSGNFCLFRSETKDLLFRDDTVCLAKLHDRNTYEKYLGEEYVKAVGNLRKCSTSSLLEACTFRRP

SEQ ID NO: 142 - protein, 1996 aa, Homo sapiens
MMRTTEDFHKPSATLNSNTATKGRYIYLEAFLEGGAPWGFTLKGGLEHGEPLIISKVEEGGKADTLSSKLQAGDEVVHINEVTLSSSRKEAVSLVKGSYKTLRLVVRRDVCTDPGHADTGASNFVSPEHLTSGPQHRKAAWSGGVKLRLKHRRSEPAGRPHSWHTTKSGEKQPDASMMQISQGMIGPPWHQSYHSSSSTSDLSNYDHAYLRRSPDQCSSQGSMESLEPSGAYPPCHLSPAKSTGSIDQLSHFHNKRDSAYSSFSTSSSILEYPHPGISGRERSGSMDNTSARGGLLEGMRQADIRYVKTVYDTRRGVSAEYEVNSSALLLQGREARASANGQGYDKWSNIPRGKGVPPPSWSQQCPSSLETATDNLPPKVGAPLPPARSDSYAAFRHRERPSSWSSLDQKRLCRPQANSLGSLKSPFIEEQLHTVLEKSPENSPPVKPKHNYTQKAQPGQPLLPTSIYPVPSLEPHFAQVPQPSVSSNGMLYPALAKESGYIAPQGACNKMATIDENGNQNGSGRPGFAFCQPLEHDLLSPVEKKPEATAKYVPSKVHFCSVPENEEDASLKRHLTPPQGNSPHSNERKSTHSNKPSSHPHSLKCPQAQAWQAGEDKRSSRLSEPWEGDFQEDHNANLWRRLEREGLGQSLSGNFGKTKSAFSSLQNIPESLRRHSSLELGRGTQEGYPGGRPTCAVNTKAEDPGRKAAPDLGSHLDRQVSYPRPEGRTGASASFNSTDPSPEEPPAPSHPHTSSLGRRGPGPGSASALQGFQYGKPHCSVLEKVSKFEQREQGSQRPSVGGSGFGHNYRPHRTVSTSSTSGNDFEETKAHIRFSESAEPLGNGEQHFKNGELKLEEASRQPCGQQLSGGASDSGRGPQRPDARLLRSQSTFQLSSEPEREPEWRDRPGSPESPLLDAPFSRAYRNSIKDAQSRVLGATSFRRRDLELGAPVASRSWRPRPSSAHVGLRSPEASASASPHTPRERHSVTPAEGDLARPVPPAARRGARRRLTPEQKKRSYSEPEKMNEVGIVEEAEPAPLGPQRNGMRFPESSVADRRRLFERDGKACSTLSLSGPELKQFQQSALADYIQRKTGKRPTSAAGCSLQEPGPLRERAQSAYLQPGPAALEGSGLASASSLSSLREPSLQPRREATLLPATVAETQQAPRDRSSSFAGGRRLGERRRGDLLSGANGGTRGTQRGDETPREPSSWGARAGKSMSAEDLLERSDVLAGPVHVRSRSSPATADKRQDVLLGQDSGFGLVKDPCYLAGPGSRSLSCSERGQEEMLPLFHHLTPRWGGSGCKAIGDSSVPSECPGTLDHQRQASRTPCPRPPLAGTQGLVTDTRAAPLTPIGTPLPSAIPSGYCSQDGQTGRQPLPPYTPAMMHRSNGHTLTQPPGPRGCEGDGPEHGVEEGTRKRVSLPQWPPPSRAKWAHAAREDSLPEESSAPDFANLKHYQKQQSLPSLCSTSDPDTPLGAPSTPGRISLRISESVLRDSPPPHEDYEDEVFVRDPHPKATSSPTFEPLPPPPPPPPSQETPVYSMDDFPPPPPHTVCEAQLDSEDPEGPRPSFNKLSKVTIARERHMPGAAHVVGSQTLASRLQTSIKGSEAESTPPSFMSVHAQLAGSLGGQPAPIQTQSLSHDPVSGTQGLEKKVSPDPQKSSEDIRTEALAKEIVHQDKSLADILDPDSRLKTTMDLMEGLFPRDVNLLKENSVKRKAIQRTVSSSGCEGKRNEDKEAVSMLVNCPAYYSVSAPKAELLNKIKEMPAEVNEEEEQADVNEKKAELIGSLTHKLETLQEAKGSLLTDIKLNNALGEEVEALISELCKPNEFDKYRMFIGDLDKVVNLLLSLSGRLARVENVLSGLGEDASNEERSSLYEKRKILAGQHEDARELKENLDRRERVVLGILANYLSEEQLQDYQHFVKMKSTLLIEQRKLDDKIKLGQEQVKCLLESLPSDFIPKAGALALPPNLTSEPIPAGGCTFSGIFPTLTSPL

SEQ ID NO: 143 - protein, 538 aa, Homo sapiens
MAAEQDPEARAAARPLLTDLYQATMALGYWRAGRARDAAEFELFFRRCPFGGAFALAAGLRDCVRFLRAFRLRDADVQFLASVLPPDTDPAFFEHLRALDCSEVTVRALPEGSLAFPGVPLLQVSGPLLVVQLLETPLLCLVSYASLVATNAARLRLIAGPEKRLLEMGLRRAQGPDGGLTASTYSYLGGFDSSSNVLAGQLRGVPVAGTLAHSFVTSFSGSEVPPDPMLAPAAGEGPGVDLAAKAQVWLEQVCAHLGLGVQEPHPGERAAFVAYALAFPRAFQGLLDTYSVWRSGLPNFLAVALALGELGYRAVGVRLDSGDLLQQAQEIRKVFRAAAAQFQVPWLESVLIVVSNNIDEEALARLAQEGSEVNVIGIGTSVVTCPQQPSLGGVYKLVAVGGQPRMKLTEDPEKQTLPGSKAAFRLLGSDGSPLMDMLQLAEEPVPQAGQELRVWPPGAQEPCTVRPAQVEPLLRLCLQQGQLCEPLPSLAESRALAQLSLSRLSPEHRRLRSPAQYQVVLSERLQALVNSLCAGQSP

SEQ ID NO: 144 - protein, 1956 aa, Homo sapiens
MEFPIGSLETNNFRRFTPESLVEIEKQIAAKQGTKKAREKHREQKDQEEKPRPQLDLKACNQLPKFYGELPAELIGEPLEDLDPFYSTHRTFMVLNKGRTISRFSATRALWLFSPFNLIRRTAIKVSVHSWFSLFITVTILVNCVCMTRTDLPEKIEYVFTVIYTFEALIKILARGFCLNEFTYLRDPWNWLDFSVITLAYVGTAIDLRGISGLRTFRVLRALKTVSVIPGLKVIVGALIHSVKKLADVTILTIFCLSVFALVGLQLFKGNLKNKCVKNDMAVNETTNYSSHRKPDIYINKRGTSDPLLCGNGSDSGHCPDGYICLKTSDNPDFNYTSFDSFAWAFLSLFRLMTQDSWERLYQQTLRTSGKIYMIFFVLVIFLGSFYLVNLILAVVTMAYEEQNQATTDEIEAKEKKFQEALEMLRKEQEVLAALGIDTTSLHSHNGSPLTSKNASERRHRIKPRVSEGSTEDNKSPRSDPYNQRRMSFLGLASGKRRASHGSVFHFRSPGRDISLPEGVTDDGVFPGDHESHRGSLLLGGGAGQQGPLPRSPLPQPSNPDSRHGEDEHQPPPTSELAPGAVDVSAFDAGQKKTFLSAEYLDEPFRAQRAMSVVSIITSVLEELEESEQKCPPCLTSLSQKYLIWDCCPMWVKLKTILFGLVTDPFAELTITLCIVVNTIFMAMEHHGMSPTFEAMLQIGNIVFTIFFTAEMVFKIIAFDPYYYFQKKWNIFDCIIVTVSLLELGVAKKGSLSVLRSFRLLRVFKLAKSWPTLNTLIKIIGNSVGALGNLTIILAIIVFVFALVGKQLLGENYRNNRKNISAPHEDWPRWHMHDFFHSFLIVFRILCGEWIENMWACMEVGQKSICLILFLTVMVLGNLVVLNLFIALLLNSFSADNLTAPEDDGEVNNLQVALARIQVFGHRTKQALCSFFSRSCPFPQPKAEPELVVKLPLSSSKAENHIAANTARGSSGGLQAPRGPRDEHSDFIANPTVWVSVPIAEGESDLDDLEDDGGEDAQSFQQEVIPKGQQEQLQQVERCGDHLTPRSPGTGTSSEDLAPSLGETWKDESVPQVPAEGVDDTSSSEGSTVDCLDPEEILRKIPELADDLEEPDDCFTEGCIRHCPCCKLDTTKSPWDVGWQVRKTCYRIVEHSWFESFIIFMILLSSGSLAFEDYYLDQKPTVKALLEYTDRVFTFIFVFEMLLKWVAYGFKKYFTNAWCWLDFLIVNISLISLTAKILEYSEVAPIKALRTLRALRPLRALSRFEGMRVVVDALVGAIPSIMNVLLVCLIFWLIFSIMGVNLFAGKFWRCINYTDGEFSLVPLSIVNNKSDCKIQNSTGSFFWVNVKVNFDNVAMGYLALLQVATFKGWMDIMYAAVDSREVNMQPKWEDNVYMYLYFVIFIIFGGFFTLNLFVGVIIDNFNQQKKKLGGQDIFMTEEQKKYYNAMKKLGSKKPQKPIPRPLNKFQGFVFDIVTRQAFDITIMVLICLNMITMMVETDDQSEEKTKILGKINQFFVAVFTGECVMKMFALRQYYFTNGWNVFDFIVVVLSIASLIFSAILKSLQSYFSPTLFRVIRLARIGRILRLIRAAKGIRTLLFALMMSLPALFNIGLLLFLVMFIYSIFGMSSFPHVRWEAGIDDMFNFQTFANSMLCLFQITTSAGWDGLLSPILNTGPPYCDPNLPNSNGTRGDCGSPAVGIIFFTTYIIISFLIMVNMYIAVILENFNVATEESTEPLSEDDFDMFYETWEKFDPEATQFITFSALSDFADTLSGPLRIPKPNRNILIQMDLPLVPGDKIHCLDILFAFTKNVLGESGELDSLKANMEEKFMATNLSKSSYEPIATTLRWKQEDISATVIQKAYRSYVLHRSMALSNTPCVPRAEEEAASLPDEGFVAFTANENCVLPDKSETASATSFPPSYESVTRGLSDRVNMRTSSSIQNEDEATSMELIAPGP

SEQ ID NO: 145 - protein, 896 aa, Homo sapiens
MLRAALSLLALPLAGAAEEPTQKPESPGEPPPGLELFRWQWHEVEAPYLVALWILVASLAKIVFHLSRKVTSLVPESCLLILLGLVLGGIVLAVAKKAEYQLEPGTFFLFLLPPIVLDSGYFMPSRLFFDNLGAILTYAVVGTLWNAFTTGAALWGLQQAGLVAPRVQAGLLDFLLFGSLISAVDPVAVLAVFEEVHVNETLFIIVFGESLLNDAVTVVLYKVCNSFVEMGSANVQATDYLKGVASLFVVSLGGAAVGLVFAFLLALTTRFTKRVRIIEPLLVFLLAYAAYLTAEMASLSAILAVTMCGLGCKKYVEANISHKSRTTVKYTMKTLASCAETVIFMLLGISAVDSSKWAWDSGLVLGTLIFILFFRALGVVLQTWVLNQFRLVPLDKIDQVVMSYGGLRGAVAFALVILLDRTKVPAKDYFVATTIVVVFFTVIVQGLTIKPLVKWLKVKRSEHHKPTLNQELHEHTFDHILAAVEDVVGHHGYHYWRDRWEQFDKKYLSQLLMRRSAYRIRDQIWDVYYRLNIRDAISFVDQGGHVLSSTGLTLPSMPSRNSVAETSVTNLLRESGSGACLDLQVIDTVRSGRDREDAVMHHLLCGGLYKPRRRYKASCSRHFISEDAQERQDKEVFQQNMKRRLESFKSTKHNICFTKSKPRPRKTGRRKKDGVANAEATNGKHRGLGFQDTAAVILTVESEEEEEESDSSETEKEDDEGIIFVARATSEVLQEGKVSGSLEVCPSPRIIPPSPTCAEKELPWKSGQGDLAVYVSSETTKIVPVDMQTGWNQSISSLESLASPPCNQAPILTCLPPHPRGTEEPQVPLHLPSDPRSSFAFPPSLAKAGRSRSESSADLPQQQELQPLMGHKDHTHLSPGTATSHWCIQFNRGSRL

SEQ ID NO: 146 - protein, 550 aa, Homo sapiens
MAFSKLLEQAGGVGLFQTLQVLTFILPCLMIPSQMLLENFSAAIPGHRCWTHMLDNGSAVSTNMTPKALLTISIPPGPNQGPHQCRRFRQPQWQLLDPNATATSWSEADTEPCVDGWVYDRSVFTSTIVAKWDLVCSSQGLKPLSQSIFMSGILVGSFIWGLLSYRFGRKPMLSWCCLQLAVAGTSTIFAPTFVIYCGLRFVAAFGMAGIFLSSLTLMVEWTTTSRRAVTMTVVGCAFSAGQAALGGLAFALRDWRTLQLAASVPFFAISLISWWLPESARWLIIKGKPDQALQELRKVARINGHKEAKNLTIEVLMSSVKEEVASAKEPRSVLDLFCVPVLRWRSCAMLVVNFSLLISYYGLVFDLQSLGRDIFLLQALFGAVDFLGRATTALLLSFLGRRTIQAGSQAMAGLAILANMLVPQDLQTLRVVFAVLGKGCFGISLTCLTIYKAELFPTPVRMTADGILHTVGRLGAMMGPLILMSRQALPLLPPLLYGVISIASSLVVLFFLPETQGLPLPDTIQDLESQKSTAAQGNRQEAVTVESTSL

SEQ ID NO: 147 - protein, 2472 aa, Homo sapiens
MDPSGVKVLETAEDIQERRQQVLDRYHRFKELSTLRRQKLEDSYRFQFFQRDAEELEKWIQEKLQIASDENYKDPTNLQGKLQKHQAFEAEVQANSGAIVKLDETGNLMISEGHFASETIRTRLMELHRQWELLLEKMREKGIKLLQAQKLVQYLRECEDVMDWINDKEAIVTSEELGQDLEHVEVLQKKFEEFQTDMAAHEERVNEVNQFAAKLIQEQHPEEELIKTKQDEVNAAWQRLKGLALQRQGKLFGAAEVQRFNRDVDETISWIKEKEQLMASDDFGRDLASVQALLRKHEGLERDLAALEDKVKALCAEADRLQQSHPLSATQIQVKREELITNWEQIRTLAAERHARLNDSYRLQRFLADFRDLTSWVTEMKALINADELASDVAGAEALLDRHQEHKGEIDAHEDSFKSADESGQALLAAGHYASDEVREKLTVLSEERAALLELWELRRQQYEQCMDLQLFYRDTEQVDNWMSKQEAFLLNEDLGDSLDSVEALLKKHEDFEKSLSAQEEKITALDEFATKLIQNNHYAMEDVATRRDALLSRRNALHERAMRRRAQLADSFHLQQFFRDSDELKSWVNEKMKTATDEAYKDPSNLQGKVQKHQAFEAELSANQSRIDALEKAGQKLIDVNHYAKDEVAARMNEVISLWKKLLEATELKGIKLREANQQQQFNRNVEDIELWLYEVEGHLASDDYGKDLTNVQNLQKKHALLEADVAAHQDRIDGITIQARQFQDAGHFDAENIKKKQEALVARYEALKEPMVARKQKLADSLRLQQLFRDVEDEETWIREKEPIAASTNRGKDLIGVQNLLKKHQALQAEIAGHEPRIKAVTQKGNAMVEEGHFAAEDVKAKLHELNQKWEALKAKASQRRQDLEDSLQAQQYFADANEAESWMREKEPIVGSTDYGKDEDSAEALLKKHEALMSDLSAYGSSIQALREQAQSCRQQVAPTDDETGKELVLALYDYQEKSPREVTMKKGDILTLLNSTNKDWWKVEVNDRQGFVPAAYVKKLDPAQSASRENLLEEQGSIALRQEQIDNQTRITKEAGSVSLRMKQVEELYHSLLELGEKRKGMLEKSCKKFMLFREANELQQWINEKEAALTSEEVGADLEQVEVLQKKFDDFQKDLKANESRLKDINKVAEDLESEGLMAEEVQAVQQQEVYGMMPRDETDSKTASPWKSARLMVHTVATFNSIKELNERWRSLQQLAEERSQLLGSAHEVQRFHRDADETKEWIEEKNQALNTDNYGHDLASVQALQRKHEGFERDLAALGDKVNSLGETAERLIQSHPESAEDLQEKCTELNQAWSSLGKRADQRKAKLGDSHDLQRFLSDFRDLMSWINGIRGLVSSDELAKDVTGAEALLERHQEHRTEIDARAGTFQAFEQFGQQLLAHGHYASPEIKQKLDILDQERADLEKAWVQRRMMLDQCLELQLFHRDCEQAENWMAAREAFLNTEDKGDSLDSVEALIKKHEDFDKAINVQEEKIAALQAFADQLIAAGHYAKGDISSRRNEVLDRWRRLKAQMIEKRSKLGESQTLQQFSRDVDEIEAWISEKLQTASDESYKDPTNIQSKHQKHQAFEAELHANADRIRGVIDMGNSLIERGACAGSEDAVKARLAALADQWQFLVQKSAEKSQKLKEANKQQNFNTGIKDFDFWLSEVEALLASEDYGKDLASVNNLLKKHQLLEADISAHEDRLKDLNSQADSLMTSSAFDTSQVKDKRDTINGRFQKIKSMAASRRAKLNESHRLHQFFRDMDDEESWIKEKKLLVGSEDYGRDLTGVQNLRKKHKRLEAELAAHEPAIQGVLDTGKKLSDDNTIGKEEIQQRLAQFVEHWKELKQLAAARGQRLEESLEYQQFVANVEEEEAWINEKMTLVASEDYGDTLAAIQGLLKKHEAFETDFTVHKDRVNDVCTNGQDLIKKNNHHEENISSKMKGLNGKVSDLEKAAAQRKAKLDENSAFLQFNWKADVVESWIGEKENSLKTDDYGRDLSSVQTLLTKQETFDAGLQAFQQEGIANITALKDQLLAAKHVQSKAIEARHASLMKRWSQLLANSAARKKKLLEAQSHFRKVEDLFLTFAKKASAFNSWFENAEEDLTDPVRCNSLEEIKALREAHDAFRSSLSSAQADFNQLAELDRQIKSFRVASNPYTWFTMEALEETWRNLQKIIKERELELQKEQRRQEENDKLRQEFAQHANAFHQWIQETRTYLLDGSCMVEESGTLESQLEATKRKHQEIRAMRSQLKKIEDLGAAMEEALILDNKYTEHSTVGLAQQWDQLDQLGMRMQHNLEQQIQARNTTGVTEEALKEFSMMFKHFDKDKSGRLNHQEFKSCLRSLGYDLPMVEEGEPDPEFEAILDTVDPNRDGHVSLQEYMAFMISRETENVKSSEEIESAFRALSSEGKPYVTKEELYQNLTREQADYCVSHMKPYVDGKGRELPTAFDYVEFTRSLFVN

SEQ ID NO: 148 - protein, 672 aa, Homo sapiens
MRSIRSFANDDRHVMVKHSTIYPSPEELEAVQNMVSTVECALKHVSDWLDETNKGTKTEGETEVKKDEAGENYSKDQGGRTLCGVMRIGLVAKGLLIKDDMDLELVLMCKDKPTETLLNTVKDNLPIQIQKLTEEKYQVEQCVNEASIIIRNTKEPTLTLKVILTSPLIRDELEKKDGENVSMKDPPDLLDRQKCLNALASLRHAKWFQARANGLKSCVIVLRILRDLCNRVPTWAPLKGWPLELICEKSIGTCNRPLGAGEALRRVMECLASGILLPGGPGLHDPCERDPTDALSYMTIQQKEDITHSAQHALRLSAFGQIYKVLEMDPLPSSKPFQKYSWSVTDKEGAGSSALKRPFEDGLGDDKDPNKKMKRNLRKILDSKAIDLMNALMRLNQIRPGLQYKLLSQSGPVHAPVFTMSVDVDGTTYEASGPSKKTAKLHVAVKVLQAMGYPTGFDADIECMSSDEKSDNESKNETVSSNSSNNTGNSTTETSSTLEVRTQGPILTASGKNPVMELNEKRRGLKYELISETGGSHDKRFVMEVEVDGQKFRGAGPNKKVAKASAALAALEKLFSGPNAANNKKKKIIPQAKGVVNTAVSAAVQAVRGRGRGTLTRGAFVGATAAPGYIAPGYGTPYGYSTAAPAYGLPKRMVLLPVMKFPTYPVPHYSFF

SEQ ID NO: 149 - protein, 538 aa, Homo sapiens
MAENLKRLVSNETLRTLQEKLDFWLKEYNTNTCDQNLNHCLELIEQVAKVQGQLFGILTAAAQEGGRNDGVETIKSRLLPWLEASFTAASLGKSVDSKVPSLQDTFDRERHKDPSPRDRDMQQLDSNLNSTRSQCNQVQDDLVETEKNLEESKNRSAISLLAAEEEINQLKKQLKSLQAQEDARHRNTDQRSSENRRSEPWSLEERKREQWNSLKQNADQQDTEAMSDYKKQLRNLKEEIAVLSAEKSALQGRSSRSRSPSPAPRSRSCSRSRSASPSTAVKVRRPSPNRSKLSNVARKAALLSRFSDSYSQARLDAQCLLRRCIDKAETVQRIIYIATVEAFHVAKMAFRHFKIHVRKSLTPSYVGSNDFENAVLDYVICHLDLYDSQSSVNDVIRAMNVNPKISFPPVVDFCLLSDFIQEICCIAFAMQALEPPLDIAYGADGEVFNDCKYRRSYDSDFTAPLVLYHVWPALMENDCVIMKGEAVTRRGAFWNSVRSVSRCRSRSLSPICPRSQIGLNTMSRSRSPSPIRCGLPRF

SEQ ID NO: 150 - protein, 705 aa, Homo sapiens [sequence omitted]

SEQ ID NO: 151 - protein, 228 aa, Homo sapiens
MPTNCAAAGCATTYNKHINISFHRFPLDPKRRKEWVRLVRRKNFVPGKHTFLCSKHFEASCFDLTGQTRRLKMDAVPTIFDFCTHIKSMKLKSRNLLKKNNSCSPAGPSNLKSNISSQQVLLEHSYAFRNPMEAKKRIIKLEKEIASLRRKMKTCLQKERRATRRWIKATCLVKNLEANSVLPKGTSEHMLPTALSSLPLEDFKILEQDQQDKTLLSLNLKQTKSTFI

SEQ ID NO: 152 - protein, 105 aa, Homo sapiens
MVKQIESKTAFQEALDAAGDKLVVVDFSATWCGPCKMIKPFFHSLSEKYSNVIFLEVDVDDCQDVASECEVKCMPTFQFFKKGQKVGEFSGANKEKLEATINELV

SEQ ID NO: 153 - protein, 524 aa, Homo sapiens
  xaa (523)..(523): Xaa is selenocysteine
MAAMAVALRGLGGRFRWRTQAVAGGVRGAARGAAAGQRDYDLLVVGGGSGGLACAKEAAQLGRKVAVVDYVEPSPQGTRWGLGGTCVNVGCIPKKLMHQAALLGGLIQDAPNYGWEVAQPVPHDWRKMAEAVQNHVKSLNWGHRVQLQDRKVKYFNIKASFVDEHTVCGVAKGGKEILLSADHIIIATGGRPRYPTHIEGALEYGITSDDIFWLKESPGKTLVVGASYVALECAGFLTGIGLDTTIMMRSIPLRGFDQQMSSMVIEHMASHGTRFLRGCAPSRVRRLPDGQLQVTWEDSTTGKEDTGTFDTVLWAIGRVPDTRSLNLEKAGVDTSPDTQKILVDSREATSVPHIYAIGDVVEGRPELTPIAIMAGRLLVQRLFGGSSDLMDYDNVPTTVFTPLEYGCVGLSEEEAVARHGQEHVEVYHAHYKPLEFTVAGRDASQCYVKMVCLREPPQLVLGLHFLGPNAGEVTQGFALGIKCGASYAQVMRTVGIHPTCSEEVVKLRISKRSGLDPTVTGCXG

SEQ ID NO: 154 - protein, 112 aa, Homo sapiens
MDGEEKTYGGCEGPDAMYVKLISSDGHEFIVKREHALTSGTIKAMLSGPGQFAENETNEVNFREIPSHVLSKVCMYFTYKVRYTNSSTEIPEFPIAPEIALELLMAANFLDC

SEQ ID NO: 155 - protein, 805 aa, Homo sapiens
MAFSPWQILSPVQWAKWTWSAVRGGAAGEDEAGGPEGDPEEEDSQAETKSLSFSSDSEGNFETPEAETPIRSPFKESCDPSLGLAGPGAKSQESQEADEQLVAEVVEKCSSKTCSKPSENEVPQQAIDSHSVKNFREEPEHDFSKISIVRPFSIETKDSTDISAVLGTKAAHGCVTAVSGKALPSSPPDALQDEAMTEGSMGVTLEASAEADLKAGNSCPELVPSRRSKLRKPKPVPLRKKAIGGEFSDTNAAVEGTPLPKASYHFSPEELDENTSPLLGDARFQKSPPDLKETPGTLSSDTNDSGVELGEESRSSPLKLEFDFTEDTGNIEARKALPRKLGRKLGSTLTPKIQKDGISKSAGLEQPTDPVARDGPLSQTSSKPDPSQWESPSFNPFGSHSVLQNSPPLSSEGSYHFDPDNFDESMDPFKPTTTLTSSDFCSPTGNHVNEILESPKKAKSRLITSGCKVKKHETQSLALDACSRDEGAVISQISDISNRDGHATDEEKLASTSCGQKSAGAEVKGEPEEDLEYFECSNVPVSTINHAFSSSEAGIEKETCQKMEEDGSTVLGLLESSAEKAPVSVSCGGESPLDGICLSESDKTAVLTLIREEIITKEIEANEWKKKYEETRQEVLEMRKIVAEYEKTIAQMIEDEQRTSMTSQKSFQQLTMEKEQALADLNSVERSLSDLFRRYENLKGVLEGFKKNEEALKKCAQDYLARVKQEEQRYQALKIHAEEKLDKANEEIAQVRTKAKAESAALHAGLRKEQMKVESLERALQQKNQEIEELTKICDELIAKLGKTD

SEQ ID NO: 156 - protein, 199 aa, Homo sapiens
MANRGPAYGLSREVQQKIEKQYDADLEQILIQWITTQCRKDVGRPQPGRENFQNWLKDGTVLCELINALYPEGQAPVKKIQASTMAFKQMEQISQFLQAAERYGINTTDIFQTVDLWEGKNMACVQRTLMNLGGLAVARDDGLFSGDPNWFPKKSKENPRNFSDNQLQEGKNVIGLQMGTNRGASQAGMTGYGMPRQIL

SEQ ID NO: 157 - protein, 806 aa, Homo sapiens
MASGADSKGDDLSTAILKQKNRPNRLIVDEAINEDNSVVSLSQPKMDELQLFRGDTVLLKGKKRREAVCIVLSDDTCSDEKIRMNRVVRNNLRVRLGDVISIQPCPDVKYGKRIHVLPIDDTVEGITGNLFEVYLKPYFLEAYRPIRKGDIFLVRGGMRAVEFKVVETDPSPYCIVAPDTVIHCEGEPIKREDEEESLNEVGYDDIGGCRKQLAQIKEMVELPLRHPALFKAIGVKPPRGILLYGPPGTGKTLIARAVANETGAFFFLINGPEIMSKLAGESESNLRKAFEEAEKNAPAIIFIDELDAIAPKREKTHGEVERRIVSQLLTLMDGLKQRAHVIVMAATNRPNSIDPALRRFGRFDREVDIGIPDATGRLEILQIHTKNMKLADDVDLEQVANETHGHVGADLAALCSEAALQAIRKKMDLIDLEDETIDAEVMNSLAVTMDDFRWALSQSNPSALRETVVEVPQVTWEDIGGLEDVKRELQELVQYPVEHPDKFLKFGMTPSKGVLFYGPPGCGKTLLAKAIANECQANFISIKGPELLTMWFGESEANVREIFDKARQAAPCVLFFDELDSIAKARGGNIGDGGGAADRVINQILTEMDGMSTKKNVFIIGATNRPDIIDPAILRPGRLDQLIYIPLPDEKSRVAILKANLRKSPVAKDVDLEFLAKMTNGFSGADLTEICQRACKLAIRESIESEIRRERERQTNPSAMEVEEDDPVPEIRRDHFEEAMRFARRSVSDNDIRKYEMFAQTLQQSRGFGSFRFPSGNQGGAGPSQGSGGGTGGSVYTEDNDDDLYG

SEQ ID NO: 158 - protein, 311 aa, Homo sapiens
MPAPRAPRALAAAAPASGKAKLTHPGKAILAGGLAGGIEICITFPTEYVKTQLQLDERSHPPRYRGIGDCVRQTVRSHGVLGLYRGLSSLLYGSIPKAAVRFGMFEFLSNHMRDAQGRLDSTRGLLCGLGAGVAEAVVVVCPMETIKVKFIHDQTSPNPKYRGFFHGVREIVREQGLKGTYQGLTATVLKQGSNQAIRFFVMTSLRNWYRGDNPNKPMNPLITGVFGAIAGAASVFGNTPLDVIKTRMQGLEAHKYRNTWDCGLQILKKEGLKAFYKGTVPRLGRVCLDVAIVFVIYDEVVKLLNKVWKTD

SEQ ID NO: 159 - protein, 1962 aa, Homo sapiens
MRELEAKATKDVERNLSRDLVQEEEQLMEEKKKKKDDKKKKEAAQKKATEQKIKVPEQIKPSVSQPQPANSNNGTSTATSTNNNAKRATANNQQPQQQQQQQQPQQQQPQQQPQPQPQQQQPQQQPQALPRYPREVPPRFRHQEHKQLLKRGQHFPVIAANLGSAVKVLNSQSESSALTNQQPQNNGEVQNSKNQSDINHSTSGSHYENSQRGPVSSTSDSSTNCKNAVVSDLSEKEAWPSAPGSDPELASECMDADSASSSESERNITIMASGNTGGEKDGLRNSTGLGSQNKFVVGSSSNNVGHGSSTGPWGFSHGAIISTCQVSVDAPESKSESSNNRMNAWGTVSSSSNGGLNPSTLNSASNHGAWPVLENNGLALKGPVGSGSSGINIQCSTIGQMPNNQSINSKVSGGSTHGTWGSLQETCESEVSGTQKVSFSGQPQNITTEMTGPNNTTNFMTSSLPNSGSVQNNELPSSNTGAWRVSTMNHPQMQAPSGMNGTSLSHLSNGESKSGGSYGTTWGAYGSNYSGDKCSGPNGQANGDTVNATLMQPGVNGPMGTNFQVNTNKGGGVWESGAANSQSTSWGSGNGANSGGSRRGWGTPAQNTGTNLPSVEWNKLPSNQHSNDSANGNGKTFTNGWKSTEEEDQGSATSQTNEQSSVWAKTGGTVESDGSTESTGRLEEKGTGESQSRDRRKIDQHTLLQSIVNRTDLDPRVLSNSGWGQTPIKQNTAWDTETSPRGERKTDNGTEAWGSSATQTFNSGACIDKTSPNGNDTSSVSGWGDPKPALRWGDSKGSNCQGGWEDDSAATGMVKSNQWGNCKEEKAAWNDSQKNKQGWGDGQKSSQGWSVSASDNWGETSRNNHWGEANKKSSSGGSDSDRSVSGWNELGKTSSFTWGNNINPNNSSGWDESSKPTPSQGWGDPPKSNQSLGWGDSSKPVSSPDWNKQQDIVGSWGIPPATGKPPGTGWLGGPIPAPAKEEEPTGWEEPSPESIRRKMEIDDGTSAWGDPSKYNYKNVNMWNKNVPNGNSRSDQQAQVHQLLTPASAISNKEASSGSGWGEPWGEPSTPATTVDNGTSAWGKPIDSGPSWGEPIAAASSTSTWGSSSVGPQALSKSGPKSMQDGWCGDDMPLPGNRPTGWEEEEDVEIGMWNSNSSQELNSSLNWPPYTKKMSSKGLSGKKRRRERGMMKGGNKQEEAWINPFVKQFSNISFSRDSPEENVQSNKMDLSGGMLQDKRMEIDKHSLNIGDYNRTVGKGPGSRPQISKESSMERNPYFDKDGIVADESQNMQFMSSQSMKLPPSNSALPNQALGSIAGLGMQNLNSVRQNGNPSMFGVGNTAAQPRGMQQPPAQPLSSSQPNLRAQVPPPLLSPQVPVSLLKYAPNNGGLNPLFGPQQVAMLNQLSQLNQLSQISQLQRLLAQQQRAQSQRSVPSGNRPQQDQQGRPLSVQQQMMQQSRQLDPNLLVKQQTPPSQQQPLHQPAMKSFLDNVMPHTTPELQKGPSPINAFSNFPIGLNSNLNVNMDMNSIKEPQSRLRKWTTVDSISVNTSLDQNSSKHGAISSGFRLEESPFVPYDFMNSSTSPASPPGSIGDGWPRAKSPNGSSSVNWPPEFRPGEPWKGYPNIDPETDPYVTPGSVINNLSINTVREVDHLRDRNSGSSSSLNTTLPSTSAWSSIRASNYNVPLSSTAQSTSARNSDSKLTWSPGSVTNTSLAHELWKVPLPPKNITAPSRPPPGLTGQKPPLSTWDNSPLRIGGGWGNSDARYTPGSSWGESSSGRITNWLVLKNLTPQIDGSTLRTLCMQHGPLITFHLNLPHGNALVRYSSKEEVVKAQKSLHMCVLGNTTILAEFASEEEISRFFAQSQSLTPSPGWQSLGSSQSRLGSLDCSHSFSSRTDLNHWNGAGLSGTNCGDLHGTSLWGTPHYSTSLWGPPSSSDPRGISSPSPINAFLSVDHLGGGGESM

SEQ ID NO: 160 - protein, 249 aa, Homo sapiens
MAPSRKFFVGGNWKMNGRKQSLGELIGTLNAAKVPADTEVVCAPPTAYIDFARQKLDPKIAVAAQNCYKVTNGAFTGEISPGMIKDCGATWVVLGHSERRHVFGESDELIGQKVAHALAEGLGVIACIGEKLDEREAGITEKVVFEQTKVIADNVKDWSKVVLAYEPVWAIGTGKTATPQQAQEVHEKLRGWLKSNVSDAVAQSTRIIYGGSVTGATCKELASQPDVDGFLVGGASLKPEFVDIINAKQ

SEQ ID NO: 161 - protein, 284 aa, Homo sapiens
MEAIKKKMQMLKLDKENALDRAEQAEAEQKQAEERSKQLEDELAAMQKKLKGTEDELDKYSEALKDAQEKLELAEKKAADAEAEVASLNRRIQLVEEELDRAQERLATALQKLEEAEKAADESERGMKVIENRALKDEEKMELQEIQLKEAKHIAEEADRKYEEVARKLVIIEGDLERTEERAELAESKCSELEEELKNVTNNLKSLEAQAEKYSQKEDKYEEEIKILTDKLKEAETRAEFAERSVAKLEKTIDDLEDELYAQKLKYKAISEELDHALNDMTSI

SEQ ID NO: 162 - protein, 284 aa, Homo sapiens
MDAIKKKMQMLKLDKENAIDRAEQAEADKKQAEDRCKQLEEEQQALQKKLKGTEDEVEKYSESVKEAQEKLEQAEKKATDAEADVASLNRRIQLVEEELDRAQERLATALQKLEEAEKAADESERGMKVIENRAMKDEEKMELQEMQLKEAKHIAEDSDRKYEEVARKLVILEGELERSEERAEVAESKCGDLEEELKIVTNNLKSLEAQADKYSTKEDKYEEEIKLLEEKLKEAETRAEFAERSVAKLEKTIDDLEDEVYAQKMKYKAISEELDNALNDITSL

SEQ ID NO: 163 - protein, 448 aa, Homo sapiens
MRECISVHVGQAGVQMGNACWELYCLEHGIQPDGQMPSDKTIGGGDDSFTTFFCETGAGKHVPRAVFVDLEPTVIDEIRNGPYRQLFHPEQLITGKEDAANNYARGHYTIGKEIIDPVLDRIRKLSDQCTGLQGFLVFHSFGGGTGSGFTSLLMERLSVDYGKKSKLEFSIYPAPQVSTAVVEPYNSILTTHTTLEHSDCAFMVDNEAIYDICRRNLDIERPTYTNLNRLISQIVSSITASLRFDGALNVDLTEFQTNLVPYPRIHFPLATYAPVISAEKAYHEQLSVAEITNACFEPANQMVKCDPRHGKYMACCLLYRGDVVPKDVNAAIAAIKTKRSIQFVDWCPTGFKVGINYQPPTVVPGGDLAKVQRAVCMLSNTTAIAEAWARLDHKFDLMYAKRAFVHWYVGEGMEEGEFSEAREDMAALEKDYEEVGIDSYEDEDEGEE

SEQ ID NO: 164 - protein, 450 aa, Homo sapiens
MRECISIHVGQAGVQIGNACWELYCLEHGIQPDGQMPSDKTIGGGDDSFNTFFSETGAGKHVPRAVFVDLEPTVVDEVRTGTYRQLFHPEQLITGKEDAANNYARGHYTIGKEIVDLVLDRIRKLADLCTGLQGFLIFHSFGGGTGSGFASLLMERLSVDYGKKSKLEFAIYPAPQVSTAVVEPYNSILTTHTTLEHSDCAFMVDNEAIYDICRRNLDIERPTYTNLNRLIGQIVSSITASLRFDGALNVDLTEFQTNLVPYPRIHFPLATYAPVISAEKAYHEQLSVAEITNACFEPANQMVKCDPRHGKYMACCMLYRGDVVPKDVNAAIATIKTKRTIQFVDWCPTGFKVGINYQPPTVVPGGDLAKVQRAVCMLSNTTAIAEAWARLDHKFDLMYAKRAFVHWYVGEGMEEGEFSEAREDLAALEKDYEEVGVDSVEAEAEEGEEY

SEQ ID NO: 165 - protein, 444 aa, Homo sapiens
MREIVHIQAGQCGNQIGAKFWEVISDEHGIDPTGTYHGDSDLQLDRISVYYNEATGGKYVPRAILVDLEPGTMDSVRSGPFGQIFRPDNFVFGQSGAGNNWAKGHYTEGAELVDSVLDVVRKEAESCDCLQGFQLTHSLGGGTGSGMGTLLISKIREEYPDRIMNTFSVVPSPKVSDTVVEPYNATLSVHQLVENTDETYCIDNEALYDICFRTLKLTTPTYGDLNHLVSATMSGVTTCLRFPGQLNADLRKLAVNMVPFPRLHFFMPGFAPLTSRGSQQYRALTVPELTQQVFDAKNMMAACDPRHGRYLTVAAVFRGRMSMKEVDEQMLNVQNKNSSYFVEWIPNNVKTAVCDIPPRGLKMAVTFIGNSTAIQELFKRISEQFTAMFRRKAFLHWYTGEGMDEMEFTEAESNMNDLVSEYQQYQDATAEEEEDFGEEAEEEA

SEQ ID NO: 166 - protein, 445 aa, Homo sapiens
MREIVHLQAGQCGNQIGAKFWEVISDEHGIDPTGTYHGDSDLQLERINVYYNEATGGKYVPRAVLVDLEPGTMDSVRSGPFGQIFRPDNFVFGQSGAGNNWAKGHYTEGAELVDSVLDVVRKEAESCDCLQGFQLTHSLGGGTGSGMGTLLISKIREEYPDRIMNTFSVVPSPKVSDTVVEPYNATLSVHQLVENTDETYCIDNEALYDICFRTLKLTTPTYGDLNHLVSATMSGVTTCLRFPGQLNADLRKLAVNMVPFPRLHFFMPGFAPLTSRGSQQYRALTVPELTQQMFDAKNMMAACDPRHGRYLTVAAVFRGRMSMKEVDEQMLNVQNKNSSYFVEWIPNNVKTAVCDIPPRGLKMSATFIGNSTAIQELFKRISEQFTAMFRRKAFLHWYTGEGMDEMEFTEAESNMNDLVSEYQQYQDATAEEEGEFEEEAEEEVA

SEQ ID NO: 167 - protein, 128 aa, Homo sapiens
MQIFVKTLTGKTITLEVEPSDTIENVKAKIQDKEGIPPDQQRLIFAGKQLEDGRTLSDYNIQKESTLHLVLRLRGGIIEPSLRQLAQKYNCDKMICRKCYARLHPRAVNCRKKKCGHTNNLRPKKKVK

SEQ ID NO: 168 - protein, 156 aa, Homo sapiens
MQIFVKTLTGKTITLEVEPSDTIENVKAKIQDKEGIPPDQQRLIFAGKQLEDGRTLSDYNIQKESTLHLVLRLRGGAKKRKKKSYTTPKKNKHKRKKVKLAVLKYYKVDENGKISRLRRECPSDECGAGVFMASHFDRHYCGKCCLTYCFNKPEDK

SEQ ID NO: 169 - protein, 1058 aa, Homo sapiens
MSSSPLSKKRRVSGPDPKPGSNCSPAQSVLSEVPSVPTNGMAKNGSEADIDEGLYSRQLYVLGHEAMKRLQTSSVLVSGLRGLGVEIAKNIILGGVKAVTLHDQGTAQWADLSSQFYLREEDIGKNRAEVSQPRLAELNSYVPVTAYTGPLVEDFLSGFQVVVLTNTPLEDQLRVGEFCHNRGIKLVVADTRGLFGQLFCDFGEEMILTDSNGEQPLSAMVSMVTKDNPGVVTCLDEARHGFESGDFVSFSEVQGMVELNGNQPMEIKVLGPYTFSICDTSNFSDYIRGGIVSQVKVPKKISFKSLVASLAEPDFVVTDFAKFSRPAQLHIGFQALHQFCAQHGRPPRPRNEEDAAELVALAQAVNARALPAVQQNNLDEDLIRKLAYVAAGDLAPINAFIGGLAAQEVMKACSGKFMPIMQWLYFDALECLPEDKEVLTEDKCLQRQNRYDGQVAVFGSDLQEKLGKQKYFLVGAGAIGCELLKNFAMIGLGCGEGGEIIVTDMDTIEKSNLNRQFLFRPWDVTKLKSDTAAAAVRQMNPHIRVTSHQNRVGPDTERIYDDDFFQNLDGVANALDNVDARMYMDRRCVYYRKPLLESGTLGTKGNVQVVIPFLTESYSSSQDPPEKSIPICTLKNFPNAIEHTLQWARDEFEGLFKQPAENVNQYLTDPKFVERTLRLAGTQPLEVLEAVQRSLVLQRPQTWADCVTWACHHWHTQYSNNIRQLLHNFPPDQLTSSGAPFWSGPKRCPHPLTFDVNNPLHLDYVMAAANLFAQTYGLTGSQDRAAVATFLQSVQVPEFTPKSGVKIHVSDQELQSANASVDDSRLEELKATLPSPDKLPGFKMYPIDFEKDDDSNFHMDFIVAASNLRAENYDIPSADRHKSKLIAGKIIPAIATTTAAVVGLVCLELYKVVQGHRQLDSYKNGFLNLALPFFGFSEPLAAPRHQYYNQEWTLWDRFEVQGLQPNGEEMTLKQFLDYFKTEHKLEITMLSQGVSMLYSFFMPAAKLKERLDQPMTEIVSRVSKRKLGRHVRALVLELCCNDESGEDVEVPYVRYTIR

SEQ ID NO: 170 - protein, 3396 aa, Homo sapiens
MFINIKSILWMCSTLIVTHALHKVKVGKSPPVRGSLSGKVSLPCHFSTMPTLPPSYNTSEFLRIKWSKIEVDKNGKDLKETTVLVAQNGNIKIGQDYKGRVSVPTHPEAVGDASLTVVKLLASDAGLYRCDVMYGIEDTQDTVSLTVDGVVFHYRAATSRYTLNFEAAQKACLDVGAVIATPEQLFAAYEDGFEQCDAGWLADQTVRYPIRAPRVGCYGDKMGKAGVRTYGFRSPQETYDVYCYVDHLDGDVFHLTVPSKFTFEEAAKECENQDARLATVGELQAAWRNGFDQCDYGWLSDASVRHPVTVARAQCGGGLLGVRTLYRFENQTGFPPPDSRFDAYCFKPKEATTIDLSILAETASPSLSKEPQMVSDRTTPIIPLVDELPVIPTEFPPVGNIVSFEQKATVQPQAITDSLATKLPTPTGSTKKPWDMDDYSPSASGPLGKLDISEIKEEVLQSTTGVSHYATDSWDGVVEDKQTQESVTQIEQIEVGPLVTSMEILKHIPSKEFPVTETPLVTARMILESKTEKKMVSTVSELVTTGHYGFTLGEEDDEDRTLTVGSDESTLIFDQIPEVITVSKTSEDTIHTHLEDLESVSASTTVSPLIMPDNNGSSMDDWEERQTSGRITEEFLGKYLSTTPFPSQHRTEIELFPYSGDKILVEGISTVIYPSLQTEMTHRRERTETLIPEMRTDTYTDEIQEEITKSPFMGKTEEEVFSGMKLSTSLSEPIHVTESSVEMTKSFDFPTLITKLSAEPTEVRDMEEDFTATPGTTKYDENITTVLLAHGTLSVEAATVSKWSWDEDNTTSKPLESTEPSASSKLPPALLTTVGMNGKDKDIPSFTEDGADEFTLIPDSTQKQLEEVTDEDIAAHGKFTIRFQPTTSTGIAEKSTLRDSTTEEKVPPITSTEGQVYATMEGSALGEVEDVDLSKPVSTVPQFAHTSEVEGLAFVSYSSTQEPTTYVDSSHTIPLSVIPKTDWGVLVPSVPSEDEVLGEPSQDILVIDQTRLEATISPETMRTTKITEGTTQEEFPWKEQTAEKPVPALSSTAWTPKEAVTPLDEQEGDGSAYTVSEDELLTGSERVPVLETTPVGKIDHSVSYPPGAVTEHKVKTDEVVTLTPRIGPKVSLSPGPEQKYETEGSSTTGFTSSLSPFSTHITQLMEETTTEKTSLEDIDLGSGLFEKPKATELIEFSTIKVTVPSDITTAFSSVDRLHTTSAFKPSSAITKKPPLIDREPGEETTSDMVIIGESTSHVPPTTLEDIVAKETETDIDREYFTTSSPPATQPTRPPTVEDKEAFGPQALSTPQPPASTKFHPDINVYIIEVRENKTGRMSDLSVIGHPIDSESKEDEPCSEETDPVHDLMAEILPEFPDIIEIDLYHSEENEEEEEECANATDVTTTPSVQYINGKHLVTTVPKDPEAAEARRGQFESVAPSQNFSDSSESDTHPFVIAKTELSTAVQPNESTETTESLEVTWKPETYPETSEHFSGGEPDVFPTVPFHEEFESGTAKKGAESVTERDTEVGHQAHEHTEPVSLFPEESSGEIAIDQESQKIAFARATEVTFGEEVEKSTSVTYTPTIVPSSASAYVSEEEAVTLIGNPWPDDLLSTKESWVEATPRQVVELSGSSSIPITEGSGEAEEDEDTMFTMVTDLSQRNTTDTLITLDTSRIITESFFEVPATTIYPVSEQPSAKVVPTKFVSETDTSEWISSTTVEEKKRKEEEGTTGTASTFEVYSSTQRSDQLILPFELESPNVATSSDSGTRKSFMSLTTPTQSEREMTDSTPVFTETNTLENLGAQTTEHSSIHQPGVQEGLTTLPRSPASVFMEQGSGEAAADPETTTVSSFSLNVEYAIQAEKEVAGTLSPHVETTFSTEPTGLVLSTVMDRVVAENITQTSREIVISERLGEPNYGAEIRGFSTGFPLEEDFSGDFREYSTVSHPIAKEETVMMEGSGDAAFRDTQTSPSTVPTSVHISHISDSEGPSSTMVSTSAFPWEEFTSSAEGSGEQLVTVSSSVVPVLPSAVQKFSGTASSIIDEGLGEVGTVNEIDRRSTILPTAEVEGTKAPVEKEEVKVSGTVSTNFPQTIEPAKLWSRQEVNPVRQEIESETTSEEQIQEEKSFESPQNSPATEQTIFDSQTFTETELKTTDYSVLTTKKTYSDDKEMKEEDTSLVNMSTPDPDANGLESYTTLPEATEKSHFFLATALVTESIPAEHVVTDSPIKKEESTKHFPKGMRPTIQESDTELLFSGLGSGEEVLPTLPTESVNFTEVEQINNTLYPHTSQVESTSSDKIEDFNRMENVAKEVGPLVSQTDIFEGSGSVTSTTLIEILSDTGAEGPTVAPLPFSTDIGHPQNQTVRWAEEIQTSRPQTITEQDSNKNSSTAEINETTTSSTDFLARAYGFEMAKEFVTSAPKPSDLYYEPSGEGSGEVDIVDSFHTSATTQATRQESSTTFVSDGSLEKHPEVPSAKAVTADGFPTVSVMLPLHSEQNKSSPDPTSTLSNTVSYERSTDGSFQDRFREFEDSTLKPNRKKPTENIIIDLDKEDKDLILTITESTILEILPELTSDKNTIIDIDHTKPVYEDILGMQTDIDTEVPSEPHDSNDESNDDSTQVQEIYEAAVNLSLTEETFEGSADVLASYTQATHDESMTYEDRSQLDHMGFHFTTGIPAPSTETELDVLLPTATSLPIPRKSATVIPEIEGIKAEAKALDDMFESSTLSDGQAIADQSEIIPTLGQFERTQEEYEDKKHAGPSFQPEFSSGAEEALVDHTPYLSIATTHLMDQSVTEVPDVMEGSNPPYYTDTTLAVSTFAKLSSQTPSSPLTIYSGSEASGHTEIPQPSALPGIDVGSSVMSPQDSFKEIHVNIEATFKPSSEEYLHITEPPSLSPDTKLEPSEDDGKPELLEEMEASPTELIAVEGTEILQDFQNKTDGQVSGEAIKMFPTIKTPEAGTVITTADEIELEGATQWPHSTSASATYGVEAGVVPWLSPQTSERPTLSSSPEINPETQAALIRGQDSTIAASEQQVAARILDSNDQATVNPVEFNTEVATPPFSLLETSNETDFLIGINEESVEGTAIYLPGPDRCKMNPCLNGGTCYPTETSYVCTCVPGYSGDQCELDFDECHSNPCRNGATCVDGFNTFRCLCLPSYVGALCEQDTETCDYGWHKFQGQCYKYFAHRRTWDAAERECRLQGAHLTSILSHEEQMFVNRVGHDYQWIGLNDKMFEHDFRWTDGSTLQYENWRPNQPDSFFSAGEDCVVIIWHENGQWNDVPCNYHLTYTCKKGTVACGQPPVVENAKTFGKMKPRYEINSLIRYHCKDGFIQRHLPTIRCLGNGRWAIPKITCMNPSAYQRTYSMKYFKNSSSAKDNSINTSKHDHRWSRRWQESRR

SEQ ID NO: 171 - protein, 466 aa, Homo sapiens
MSTRSVSSSSYRRMFGGPGTASRPSSSRSYVTTSTRTYSLGSALRPSTSRSLYASSPGGVYATRSSAVRLRSSVPGVRLLQDSVDFSLADAINTEFKNTRTNEKVELQELNDRFANYIDKVRFLEQQNKILLAELEQLKGQGKSRLGDLYEEEMRELRRQVDQLTNDKARVEVERDNLAEDIMRLREKLQEEMLQREEAENTLQSFRQDVDNASLARLDLERKVESLQEEIAFLKKLHEEEIQELQAQIQEQHVQIDVDVSKPDLTAALRDVRQQYESVAAKNLQEAEEWYKSKFADLSEAANRNNDALRQAKQESTEYRRQVQSLTCEVDALKGTNESLERQMREMEENFAVEAANYQDTIGRLQDEIQNMKEEMARHLREYQDLLNVKMALDIEIATYRKLLEGEESRISLPLPNFSSLNLRETNLDSLPLVDTHSKRTLLIKTVETRDGQVINETSQHHDDLE

SEQ ID NO: 172 - protein, 474 aa, Homo sapiens [sequence omitted]

SEQ ID NO: 173 - protein, 478 aa, Homo sapiens
MAPLRPLLILALLAWVALADQESCKGRCTEGFNVDKKCQCDELCSYYQSCCTDYTAECKPQVTRGDVFTMPEDEYTVYDDGEEKNNATVHEQVGGPSLTSDLQAQSKGNPEQTPVLKPEEEAPAPEVGASKPEGIDSRPETLHPGRPQPPAEEELCSGKPFDAFTDLKNGSLFAFRGQYCYELDEKAVRPGYPKLIRDVWGIEGPIDAAFTRINCQGKTYLFKGSQYWRFEDGVLDPDYPRNISDGFDGIPDNVDAALALPAHSYSGRERVYFFKGKQYWEYQFQHQPSQEECEGSSLSAVFEHFAMMQRDSWEDIFELLFWGRTSAGTRQPQFISRDWHGVPGQVDAAMAGRIYISGMAPRPSLAKKQRFRHRNRKGYRSQRGHSRGRNQNSRRPSRATWLSLFSSEESNLGANNYDDYRMDWLVPATCEPIQSVFFFSGDKYYRVNLRTRRVDTVDPPYPRSIAQYWLGCPAPGHL

SEQ ID NO: 174 - protein, 907 aa, Homo sapiens
MNAPLDGLSVSSSSTGSLGSAAGAGGGGGAGLRLLSANVRQLHQALTALLSEAEREQFTHCLNAYHARRNVFDLVRTLRVLLDSPVKRRLLPMLRLVIPRSDQLLFDQYTAEGLYLPATTPYRQPAWGGPDSAGPGEVRLVSLRRAKAHEGLGFSIRGGSEHGVGIYVSLVEPGSLAEKEGLRVGDQILRVNDKSLARVTHAEAVKALKGSKKLVLSVYSAGRIPGGYVTNHIYTWVDPQGRSISPPSGLPQPHGGALRQQEGDRRSTLHLLQGGDEKKVNLVLGDGRSLGLTIRGGAEYGLGIYITGVDPGSEAEGSGLKVGDQILEVNGRSFLNILHDEAVRLLKSSRHLILTVKDVGRLPRARTTVDETKWIASSRIRETMANSAGFLGDLTTEGINKPGFYKGPAGSQVTLSSLGNQTRVLLEEQARHLLNEQEHATMAYYLDEYRGGSVSVEALVMALFKLLNTHAKFSLLSEVRGTISPQDLERFDHLVLRREIESMKARQPPGPGAGDTYSMVSYSDTGSSTGSHGTSTTVSSARNTLDLEETGEAVQGNINALPDVSVDDVRSTSQGLSSFKPLPRPPPLAQGNDLPLGQPRKLGREDLQPPSSMPSCSGTVFSAPQNRSPPAGTAPTPGTSSAQDLPSSPIYASVSPANPSSKRPLDAHLALVNQHPIGPFPRVQSPPHLKSPSAEATVAGGCLLPPSPSGHPDQTGTNQHFVMVEVHRPDSEPDVNEVRALPQTRTASTLSHLSDSGQTLSEDSGVDAGEAEASAPGRGRQSVSTKSRSSKELPRNERPTDGANKPPGLLEPTSTLVRVKKSAATLGIAIEGGANTRQPLPRIVTIQRGGSAHNCGQLKVGHVILEVNGLTLRGKEHREAARIIAEAFKTKDRDYIDFLVTEFNVML

SEQ ID NO: 175 - protein, 411 aa, Homo sapiens
MAKRPGSPGSREMGLLTFRDVVIEFSLEEWQCLDHAQQNLYRDVMLENYRNLVSLGIAVSKPDLITCLEQNKEPWNIKRNEMVTKHPVMCSHFTQDLPPELGIKDSLQKVIPRRYGKSGHDNLQVKTCKSMGECEVQKGGCNEVNQCLSTTQNKIFQTHKCVKVFGKFSNSNRHKTRHTGKKHFKCKKYGKSFCMVSQLHQHQIIHTRENSYQCEECGKPFNCSSTLSKHKRIHTGEKPYRCEECGKAFTWSSTLTKHRRIHTGEKPYTCEECGQAFSRSSTLANHKRIHTGEKPYTCEECGKAFSLSSSLTYHKRIHTGEKPYTCEECGKAFNCSSTLKKHKIIHTGEKPYKCKECGKAFAFSSTLNTHKRIHTGEEPYKCEECDKAFKWSSSLANHKSMHTGEKPYKCE

What is claimed is:

1. A method of identifying a disease biomarker, comprising the steps of:
a) providing a biological sample comprising a substanially pure material obtained from a glandular lumen obtained from a mammalian subject having or at risk of developing the disease; and
b) identifying a protein in the biological sample;
thereby identifying the disease biomarker.

2. The method of claim 1, wherein the material is obtained from the glandular lumen from a tissue section by the method of tissue microdissection.

3. The method of claim 1, wherein the mammalian subject has cancer.

4. The method of claim 1, comprising identifying two or more proteins in the biological sample, thereby generating a disease protein profile.

5. The method of claim 4, wherein the disease protein profile is compared with a control protein profile comprising two or more proteins identified in a control biological sample comprising a substanially pure material obtained from a glandular lumen obtained from a mammalian subject not having or not at risk of developing the disease.

6. The method of claim 5, wherein the disease protein profile contains two or more proteins not measurably detectable in the control protein profile.

7. The method of claim 5, wherein the disease protein profile contains two or more proteins at measurably different levels than in the control protein profile.

8. The method of claim 4, wherein the disease protein profile is obtained from two or more biological samples from two or more glandular lumens.

9. The method of claim 8, wherein the two or more glandular lumens are obtained from a plurality of mammalian subjects.

10. The method of claim 5, wherein the control protein profile is obtained from two or more biological samples from two or more glandular lumens.

11. The method of claim 8, wherein the two or more glandular lumens are obtained from a plurality of mammalian subjects.

12. The method of claim 5, wherein the disease protein profile and the control protein profile are obtained from the same tissue or organ type.

13. The method of claim 1, wherein the biological sample is obtained from an animal model of a human disease.

14. The method of claim 1, wherein the protein is identified by mass spectrometry.

15. The method of claim 13, wherein said mass spectrometry is selected from the group consisting of RPLC-MS/MS, LC-ESI-MS, LC-ESI-MS/MS, LC-nanospray-MS, LC-nanospray-MS/MS, MALDI-TOF, MALDI-TOF/TOF, SELDI-TOF, and SELDI-TOF/TOF.

16. The method of claim 1, wherein the material comprises histopathologically processed tissue, fresh tissue, or frozen tissue.

17. The method of claim 16, wherein the histopathologically processed tissue is selected from the group consisting of formalin-fixed tissue or cells, formalin-fixed/paraffin embedded (FFPE) tissue or cells, FFPE tissue blocks and cells from said blocks, FFPE tissue blocks and cells from diseased and normal tissue, and FFPE tissue blocks and cells from biopsies obtained surgically.

18. The method of claim 4, wherein the frozen tissue is frozen by freezing in air or liquid freezing.

19. The method of claim 1, wherein the biological sample comprises a multi-use biomolecule lysate prepared by the steps of:
a) heating a composition comprising the biological sample and a reaction buffer at a temperature and a time sufficient to negatively affect protein cross-linking in the biological sample, and
b) treating the resulting composition with an effective amount of a proteolytic enzyme for a time sufficient to disrupt the tissue and cellular structure of said biological sample.

20. The method of claim 18, wherein the biological sample is prepared using Liquid Tissue® reagents and protocols.

21. The method of claim 5, wherein the control biological sample is prepared using Liquid Tissue® reagents and protocols.

22. The method of claim 1, wherein the protein is identified using a protein array and an immuno-based assay.

23. The method of claim 4, wherein the disease protein profile is compared with a control protein profile comprising two or more proteins identified in a control biological sample comprising a substanially pure material obtained from epithelial cells surrounding a glandular lumen, wherein the material is obtained from a mammalian subject not having or not at risk of developing the disease.

24. The method of claim 1, wherein the protein is a soluble protein.

25. The method of claim 1, wherein the protein contains one or more soluble peptides.

26. The method of claim 1, wherein the protein is selected from the group consisting of proteins listed in Tables 1 and 3.

27. A method of identifying a disease biomarker, comprising the steps of:
a) providing a first biological sample comprising a protein present within a glandular lumen, wherein the biological sample comprises material obtained from the glandular lumen;
b) providing a second biological sample comprises material obtained from an epithelial layer adjacent to the glandular lumen;
c) identifying a biomarker protein present in the first biological sample; and
d) comparing the amount of the biomarker protein present in the first biological sample and in the second biological sample,
thereby identifying the disease biomarker.
